United States Patent Application Publication US 2021/0382068 A1 - sequence listing, part 4

SEQ ID NO: 133041 - protein, 9 aa, Homo Sapiens
ISVAEVEKW

SEQ ID NO: 133042 - protein, 9 aa, Homo Sapiens
ISVAPEETW

SEQ ID NO: 133043 - protein, 9 aa, Homo Sapiens
ISVPIFKQF

SEQ ID NO: 133044 - protein, 9 aa, Homo Sapiens
ISVPPIQKW

SEQ ID NO: 133045 - protein, 9 aa, Homo Sapiens
ITAGAHRLW

SEQ ID NO: 133046 - protein, 9 aa, Homo Sapiens
ITAQELDRW

SEQ ID NO: 133047 - protein, 9 aa, Homo Sapiens
ITDFHPDTW

SEQ ID NO: 133048 - protein, 9 aa, Homo Sapiens
ITFAPTYRF

SEQ ID NO: 133049 - protein, 9 aa, Homo Sapiens
ITIPKNMHW

SEQ ID NO: 133050 - protein, 9 aa, Homo Sapiens
ITNHIHVRI

SEQ ID NO: 133051 - protein, 9 aa, Homo Sapiens
ITNKYQLVF

SEQ ID NO: 133052 - protein, 9 aa, Homo Sapiens
ITSPTGETW

SEQ ID NO: 133053 - protein, 9 aa, Homo Sapiens
ITTDVLYTI

SEQ ID NO: 133054 - protein, 9 aa, Homo Sapiens
ITTDVNPYY

SEQ ID NO: 133055 - protein, 9 aa, Homo Sapiens
ITTKAISRW

SEQ ID NO: 133056 - protein, 9 aa, Homo Sapiens
ITTSLTTKW

SEQ ID NO: 133057 - protein, 9 aa, Homo Sapiens
ITTTINPRF

SEQ ID NO: 133058 - protein, 9 aa, Homo Sapiens
ITTVIQHVF

SEQ ID NO: 133059 - protein, 9 aa, Homo Sapiens
ITVKVNAPY

SEQ ID NO: 133060 - protein, 9 aa, Homo Sapiens
ITYDKLNKW

SEQ ID NO: 133061 - protein, 9 aa, Homo Sapiens
ITYQHIDRW

SEQ ID NO: 133062 - protein, 9 aa, Homo Sapiens
ITYTFHSTW

SEQ ID NO: 133063 - protein, 9 aa, Homo Sapiens
IVCSVPHTW

SEQ ID NO: 133064 - protein, 9 aa, Homo Sapiens
IVDFTQEEW

SEQ ID NO: 133065 - protein, 9 aa, Homo Sapiens
IVDIGRQDW

SEQ ID NO: 133066 - protein, 9 aa, Homo Sapiens
IVSSALMIW

SEQ ID NO: 133067 - protein, 9 aa, Homo Sapiens
KAADPVPSF

SEQ ID NO: 133068 - protein, 9 aa, Homo Sapiens
KAAELFSQW

SEQ ID NO: 133069 - protein, 9 aa, Homo Sapiens
KAAGEKVYW

SEQ ID NO: 133070 - protein, 9 aa, Homo Sapiens
KAAHVSEQF

SEQ ID NO: 133071 - protein, 9 aa, Homo Sapiens
KAALELEMW

SEQ ID NO: 133072 - protein, 9 aa, Homo Sapiens
KAASVRPVL

SEQ ID NO: 133073 - protein, 9 aa, Homo Sapiens
KACDKSFHF

SEQ ID NO: 133074 - protein, 9 aa, Homo Sapiens
KACDLGHIW

SEQ ID NO: 133075 - protein, 9 aa, Homo Sapiens
KACTIAIRY

SEQ ID NO: 133076 - protein, 9 aa, Homo Sapiens
KADKVTMLW

SEQ ID NO: 133077 - protein, 9 aa, Homo Sapiens
KADVVKVKW

SEQ ID NO: 133078 - protein, 9 aa, Homo Sapiens
KAFDQRLTF

SEQ ID NO: 133079 - protein, 9 aa, Homo Sapiens
KAFNLRISF

SEQ ID NO: 133080 - protein, 9 aa, Homo Sapiens
KAFPEHFTY

SEQ ID NO: 133081 - protein, 9 aa, Homo Sapiens
KAFPFHIIF

SEQ ID NO: 133082 - protein, 9 aa, Homo Sapiens
KAFQATLRW

SEQ ID NO: 133083 - protein, 9 aa, Homo Sapiens
KAFSTRWNW

SEQ ID NO: 133084 - protein, 9 aa, Homo Sapiens
KAGIIQDTW

SEQ ID NO: 133085 - protein, 9 aa, Homo Sapiens
KAGPGLKRW

SEQ ID NO: 133086 - protein, 9 aa, Homo Sapiens
KAGQTVTIW

SEQ ID NO: 133087 - protein, 9 aa, Homo Sapiens
KAGQVVTIW

SEQ ID NO: 133088 - protein, 9 aa, Homo Sapiens
KAGSSKYQW

SEQ ID NO: 133089 - protein, 9 aa, Homo Sapiens
KAIATTVTY

SEQ ID NO: 133090 - protein, 9 aa, Homo Sapiens
KAIEENNNF

SEQ ID NO: 133091 - protein, 9 aa, Homo Sapiens
KAIEKNVLF

SEQ ID NO: 133092 - protein, 9 aa, Homo Sapiens
KAIELLQEF

SEQ ID NO: 133093 - protein, 9 aa, Homo Sapiens
KAIETQPNF

SEQ ID NO: 133094 - protein, 9 aa, Homo Sapiens
KAIEYVHGY

SEQ ID NO: 133095 - protein, 9 aa, Homo Sapiens
KAIKELEEW

SEQ ID NO: 133096 - protein, 9 aa, Homo Sapiens
KAINFNFGY

SEQ ID NO: 133097 - protein, 9 aa, Homo Sapiens
KAINPINTF

SEQ ID NO: 133098 - protein, 9 aa, Homo Sapiens
KAISKNVLF

SEQ ID NO: 133099 - protein, 9 aa, Homo Sapiens
KAISPSEGW

SEQ ID NO: 133100 - protein, 9 aa, Homo Sapiens
KAITFVTQY

SEQ ID NO: 133101 - protein, 9 aa, Homo Sapiens
KAIWNVINW

SEQ ID NO: 133102 - protein, 9 aa, Homo Sapiens
KALDDKNCW

SEQ ID NO: 133103 - protein, 9 aa, Homo Sapiens
KALEYVFKF

SEQ ID NO: 133104 - protein, 9 aa, Homo Sapiens
KALKGQFNF

SEQ ID NO: 133105 - protein, 9 aa, Homo Sapiens
KALKMTIFW

SEQ ID NO: 133106 - protein, 9 aa, Homo Sapiens
KALPVNVKW

SEQ ID NO: 133107 - protein, 9 aa, Homo Sapiens
KALSMPEKW

SEQ ID NO: 133108 - protein, 9 aa, Homo Sapiens
KAMGIMNSF

SEQ ID NO: 133109 - protein, 9 aa, Homo Sapiens
KAMTGVEQW

SEQ ID NO: 133110 - protein, 9 aa, Homo Sapiens
KAMVFLEYF

SEQ ID NO: 133111 - protein, 9 aa, Homo Sapiens
KANDLDVRW

SEQ ID NO: 133112 - protein, 9 aa, Homo Sapiens
KANHAELIL

SEQ ID NO: 133113 - protein, 9 aa, Homo Sapiens
KANHFLILF

SEQ ID NO: 133114 - protein, 9 aa, Homo Sapiens
KANITCLVY

SEQ ID NO: 133115 - protein, 9 aa, Homo Sapiens
KANIVHLML

SEQ ID NO: 133116 - protein, 9 aa, Homo Sapiens
KANPALYVL

SEQ ID NO: 133117 - protein, 9 aa, Homo Sapiens
KANPTFHHW

SEQ ID NO: 133118 - protein, 9 aa, Homo Sapiens
KANSSVGKW

SEQ ID NO: 133119 - protein, 9 aa, Homo Sapiens
KANVVCVVY

SEQ ID NO: 133120 - protein, 9 aa, Homo Sapiens
KAQAQVSEW

SEQ ID NO: 133121 - protein, 9 aa, Homo Sapiens
KASDVLARF

SEQ ID NO: 133122 - protein, 9 aa, Homo Sapiens
KASNLLLGF

SEQ ID NO: 133123 - protein, 9 aa, Homo Sapiens
KASPTQNLF

SEQ ID NO: 133124 - protein, 9 aa, Homo Sapiens
KATDILPKW

SEQ ID NO: 133125 - protein, 9 aa, Homo Sapiens
KATNVCTRF

SEQ ID NO: 133126 - protein, 9 aa, Homo Sapiens
KATNVVMNY

SEQ ID NO: 133127 - protein, 9 aa, Homo Sapiens
KATPIKLIW

SEQ ID NO: 133128 - protein, 9 aa, Homo Sapiens
KATYFSEKW

SEQ ID NO: 133129 - protein, 9 aa, Homo Sapiens
KAVEAAHTF

SEQ ID NO: 133130 - protein, 9 aa, Homo Sapiens
KAVEEKIEW

SEQ ID NO: 133131 - protein, 9 aa, Homo Sapiens
KAVETVHNL

SEQ ID NO: 133132 - protein, 9 aa, Homo Sapiens
KAVEVHVLL

SEQ ID NO: 133133 - protein, 9 aa, Homo Sapiens
KAVFLVPKW

SEQ ID NO: 133134 - protein, 9 aa, Homo Sapiens
KAVQDLCGW

SEQ ID NO: 133135 - protein, 9 aa, Homo Sapiens
KAVSLFLCY

SEQ ID NO: 133136 - protein, 9 aa, Homo Sapiens
KAVTHQVKF

SEQ ID NO: 133137 - protein, 9 aa, Homo Sapiens
KAYSEAHEI

SEQ ID NO: 133138 - protein, 9 aa, Homo Sapiens
KFIEIDQAW

SEQ ID NO: 133139 - protein, 9 aa, Homo Sapiens
KFNETLMKF

SEQ ID NO: 133140 - protein, 9 aa, Homo Sapiens
KFNPVSFTW

SEQ ID NO: 133141 - protein, 9 aa, Homo Sapiens
KFVDILTNW

SEQ ID NO: 133142 - protein, 9 aa, Homo Sapiens
KGENINICW

SEQ ID NO: 133143 - protein, 9 aa, Homo Sapiens
KGGPPPPNW

SEQ ID NO: 133144 - protein, 9 aa, Homo Sapiens
KGIKVVGKW

SEQ ID NO: 133145 - protein, 9 aa, Homo Sapiens
KGLSTQAIW

SEQ ID NO: 133146 - protein, 9 aa, Homo Sapiens
KGSQLQERW

SEQ ID NO: 133147 - protein, 9 aa, Homo Sapiens
KGWRDVTTF

SEQ ID NO: 133148 - protein, 9 aa, Homo Sapiens
KICDIAINW

SEQ ID NO: 133149 - protein, 9 aa, Homo Sapiens
KIETVNESW

SEQ ID NO: 133150 - protein, 9 aa, Homo Sapiens
KIIDSKETW

SEQ ID NO: 133151 - protein, 9 aa, Homo Sapiens
KIIFIDSTW

SEQ ID NO: 133152 - protein, 9 aa, Homo Sapiens
KIIPKTLTW

SEQ ID NO: 133153 - protein, 9 aa, Homo Sapiens
KIIPLVVKF

SEQ ID NO: 133154 - protein, 9 aa, Homo Sapiens
KIISTLPSW

SEQ ID NO: 133155 - protein, 9 aa, Homo Sapiens
KILGKFYSW

SEQ ID NO: 133156 - protein, 9 aa, Homo Sapiens
KILPFSPEF

SEQ ID NO: 133157 - protein, 9 aa, Homo Sapiens
KILSEEPRW

SEQ ID NO: 133158 - protein, 9 aa, Homo Sapiens
KILSKVEKF

SEQ ID NO: 133159 - protein, 9 aa, Homo Sapiens
KILSNQEEW

SEQ ID NO: 133160 - protein, 9 aa, Homo Sapiens
KIMADNPSW

SEQ ID NO: 133161 - protein, 9 aa, Homo Sapiens
KINELELRL

SEQ ID NO: 133162 - protein, 9 aa, Homo Sapiens
KINKVDMQW

SEQ ID NO: 133163 - protein, 9 aa, Homo Sapiens
KINTESSLW

SEQ ID NO: 133164 - protein, 9 aa, Homo Sapiens
KISLISEKW

SEQ ID NO: 133165 - protein, 9 aa, Homo Sapiens
KISPKSDVW

SEQ ID NO: 133166 - protein, 9 aa, Homo Sapiens
KISVCQQTW

SEQ ID NO: 133167 - protein, 9 aa, Homo Sapiens
KITDVIIGF

SEQ ID NO: 133168 - protein, 9 aa, Homo Sapiens
KIVLEKVCW

SEQ ID NO: 133169 - protein, 9 aa, Homo Sapiens
KLEDRQTSW

SEQ ID NO: 133170 - protein, 9 aa, Homo Sapiens
KLFYDVITW

SEQ ID NO: 133171 - protein, 9 aa, Homo Sapiens
KLSSALQKW

SEQ ID NO: 133172 - protein, 9 aa, Homo Sapiens
KLTNIVEKF

SEQ ID NO: 133173 - protein, 9 aa, Homo Sapiens
KMCSMVKKW

SEQ ID NO: 133174 - protein, 9 aa, Homo Sapiens
KMFIGGLSW

SEQ ID NO: 133175 - protein, 9 aa, Homo Sapiens
KMGPMEKFW

SEQ ID NO: 133176 - protein, 9 aa, Homo Sapiens
KMLDESFQW

SEQ ID NO: 133177 - protein, 9 aa, Homo Sapiens
KMNNVNVVY

SEQ ID NO: 133178 - protein, 9 aa, Homo Sapiens
KMNPQSAFF

SEQ ID NO: 133179 - protein, 9 aa, Homo Sapiens
KMTILQTYF

SEQ ID NO: 133180 - protein, 9 aa, Homo Sapiens
KQCGKTFTW

SEQ ID NO: 133181 - protein, 9 aa, Homo Sapiens
KSADWVSDW

SEQ ID NO: 133182 - protein, 9 aa, Homo Sapiens
KSAFVRTQW

SEQ ID NO: 133183 - protein, 9 aa, Homo Sapiens
KSALVFITF

SEQ ID NO: 133184 - protein, 9 aa, Homo Sapiens
KSANVSSIW

SEQ ID NO: 133185 - protein, 9 aa, Homo Sapiens
KSAQDVQKF

SEQ ID NO: 133186 - protein, 9 aa, Homo Sapiens
KSAQPADGW

SEQ ID NO: 133187 - protein, 9 aa, Homo Sapiens
KSAQPIEKF

SEQ ID NO: 133188 - protein, 9 aa, Homo Sapiens
KSCEKIHFI

SEQ ID NO: 133189 - protein, 9 aa, Homo Sapiens
KSCGLNPKL

SEQ ID NO: 133190 - protein, 9 aa, Homo Sapiens
KSCMNQVTI

SEQ ID NO: 133191 - protein, 9 aa, Homo Sapiens
KSCPERHYW

SEQ ID NO: 133192 - protein, 9 aa, Homo Sapiens
KSCQSFISW

SEQ ID NO: 133193 - protein, 9 aa, Homo Sapiens
KSDDFGQTW

SEQ ID NO: 133194 - protein, 9 aa, Homo Sapiens
KSDGKILVW

SEQ ID NO: 133195 - protein, 9 aa, Homo Sapiens
KSFADINLY

SEQ ID NO: 133196 - protein, 9 aa, Homo Sapiens
KSFDFHFGF

SEQ ID NO: 133197 - protein, 9 aa, Homo Sapiens
KSFDNIKNW

SEQ ID NO: 133198 - protein, 9 aa, Homo Sapiens
KSFDNIRNW

SEQ ID NO: 133199 - protein, 9 aa, Homo Sapiens
KSFEDIHHY

SEQ ID NO: 133200 - protein, 9 aa, Homo Sapiens
KSFEGLFYF

SEQ ID NO: 133201 - protein, 9 aa, Homo Sapiens
KSFENISKW

SEQ ID NO: 133202 - protein, 9 aa, Homo Sapiens
KSFGGSHVM

SEQ ID NO: 133203 - protein, 9 aa, Homo Sapiens
KSFGLFSKW

SEQ ID NO: 133204 - protein, 9 aa, Homo Sapiens
KSFMDFGSW

SEQ ID NO: 133205 - protein, 9 aa, Homo Sapiens
KSFNRHLHF

SEQ ID NO: 133206 - protein, 9 aa, Homo Sapiens
KSFNSVHLL

SEQ ID NO: 133207 - protein, 9 aa, Homo Sapiens
KSFPSIFKF

SEQ ID NO: 133208 - protein, 9 aa, Homo Sapiens
KSFQAIHQF

SEQ ID NO: 133209 - protein, 9 aa, Homo Sapiens
KSFVKVYNY

SEQ ID NO: 133210 - protein, 9 aa, Homo Sapiens
KSGAIIEKW

SEQ ID NO: 133211 - protein, 9 aa, Homo Sapiens
KSGELLATW

SEQ ID NO: 133212 - protein, 9 aa, Homo Sapiens
KSGSPVATF

SEQ ID NO: 133213 - protein, 9 aa, Homo Sapiens
KSHVECARF

SEQ ID NO: 133214 - protein, 9 aa, Homo Sapiens
KSIDDTSNF

SEQ ID NO: 133215 - protein, 9 aa, Homo Sapiens
KSIDLIQKW

SEQ ID NO: 133216 - protein, 9 aa, Homo Sapiens
KSIEEIVSF

SEQ ID NO: 133217 - protein, 9 aa, Homo Sapiens
KSIEELQDW

SEQ ID NO: 133218 - protein, 9 aa, Homo Sapiens
KSIEERVTI

SEQ ID NO: 133219 - protein, 9 aa, Homo Sapiens
KSIELFYKF

SEQ ID NO: 133220 - protein, 9 aa, Homo Sapiens
KSIEPVSSW

SEQ ID NO: 133221 - protein, 9 aa, Homo Sapiens
KSIHIVVTM

SEQ ID NO: 133222 - protein, 9 aa, Homo Sapiens
KSIKNIQKI

SEQ ID NO: 133223 - protein, 9 aa, Homo Sapiens
KSINDYNTW

SEQ ID NO: 133224 - protein, 9 aa, Homo Sapiens
KSIPLVESW

SEQ ID NO: 133225 - protein, 9 aa, Homo Sapiens
KSIPVTQEL

SEQ ID NO: 133226 - protein, 9 aa, Homo Sapiens
KSIVQVETL

SEQ ID NO: 133227 - protein, 9 aa, Homo Sapiens
KSIYPTLEI

SEQ ID NO: 133228 - protein, 9 aa, Homo Sapiens
KSKPFCEKL

SEQ ID NO: 133229 - protein, 9 aa, Homo Sapiens
KSLALLLNY

SEQ ID NO: 133230 - protein, 9 aa, Homo Sapiens
KSLAVKEFF

SEQ ID NO: 133231 - protein, 9 aa, Homo Sapiens
KSLDTTDNW

SEQ ID NO: 133232 - protein, 9 aa, Homo Sapiens
KSLDTTLQF

SEQ ID NO: 133233 - protein, 9 aa, Homo Sapiens
KSLEAFFLY

SEQ ID NO: 133234 - protein, 9 aa, Homo Sapiens
KSLEEAQEW

SEQ ID NO: 133235 - protein, 9 aa, Homo Sapiens
KSLEEIYLF

SEQ ID NO: 133236 - protein, 9 aa, Homo Sapiens
KSLELHEEF

SEQ ID NO: 133237 - protein, 9 aa, Homo Sapiens
KSLENAIEW

SEQ ID NO: 133238 - protein, 9 aa, Homo Sapiens
KSLENQTYF

SEQ ID NO: 133239 - protein, 9 aa, Homo Sapiens
KSLGVHYVF

SEQ ID NO: 133240 - protein, 9 aa, Homo Sapiens
KSLGVTTKF

SEQ ID NO: 133241 - protein, 9 aa, Homo Sapiens
KSLIEKNSW

SEQ ID NO: 133242 - protein, 9 aa, Homo Sapiens
KSLLKIFAW

SEQ ID NO: 133243 - protein, 9 aa, Homo Sapiens
KSLLVVHFW

SEQ ID NO: 133244 - protein, 9 aa, Homo Sapiens
KSLLWTETF

SEQ ID NO: 133245 - protein, 9 aa, Homo Sapiens
KSLPDTELM

SEQ ID NO: 133246 - protein, 9 aa, Homo Sapiens
KSLWKHHEY

SEQ ID NO: 133247 - protein, 9 aa, Homo Sapiens
KSLYHSVEW

SEQ ID NO: 133248 - protein, 9 aa, Homo Sapiens
KSMPTVTQI

SEQ ID NO: 133249 - protein, 9 aa, Homo Sapiens
KSNELFTTF

SEQ ID NO: 133250 - protein, 9 aa, Homo Sapiens
KSNKLLYTF

SEQ ID NO: 133251 - protein, 9 aa, Homo Sapiens
KSNNVEMDW

SEQ ID NO: 133252 - protein, 9 aa, Homo Sapiens
KSNPKPLVL

SEQ ID NO: 133253 - protein, 9 aa, Homo Sapiens
KSNTWSPKY

SEQ ID NO: 133254 - protein, 9 aa, Homo Sapiens
KSQDILLKW

SEQ ID NO: 133255 - protein, 9 aa, Homo Sapiens
KSQDLELSW

SEQ ID NO: 133256 - protein, 9 aa, Homo Sapiens
KSQIFQIFY

SEQ ID NO: 133257 - protein, 9 aa, Homo Sapiens
KSQPLVHLM

SEQ ID NO: 133258 - protein, 9 aa, Homo Sapiens
KSRPEVITF

SEQ ID NO: 133259 - protein, 9 aa, Homo Sapiens
KSSAISLHY

SEQ ID NO: 133260 - protein, 9 aa, Homo Sapiens
KSSATRLLY

SEQ ID NO: 133261 - protein, 9 aa, Homo Sapiens
KSSAVQQLL

SEQ ID NO: 133262 - protein, 9 aa, Homo Sapiens
KSSDIAKTF

SEQ ID NO: 133263 - protein, 9 aa, Homo Sapiens
KSSDKQLRI

SEQ ID NO: 133264 - protein, 9 aa, Homo Sapiens
KSSDPEMRW

SEQ ID NO: 133265 - protein, 9 aa, Homo Sapiens
KSSDVYVSY

SEQ ID NO: 133266 - protein, 9 aa, Homo Sapiens
KSSEVFTTF

SEQ ID NO: 133267 - protein, 9 aa, Homo Sapiens
KSSIGLNTW

SEQ ID NO: 133268 - protein, 9 aa, Homo Sapiens
KSSKIMESF

SEQ ID NO: 133269 - protein, 9 aa, Homo Sapiens
KSSLTQHSW

SEQ ID NO: 133270 - protein, 9 aa, Homo Sapiens
KSSQVQRRF

SEQ ID NO: 133271 - protein, 9 aa, Homo Sapiens
KSSSSYHTW

SEQ ID NO: 133272 - protein, 9 aa, Homo Sapiens
KSSTVLHTF

SEQ ID NO: 133273 - protein, 9 aa, Homo Sapiens
KSSVEVYAW

SEQ ID NO: 133274 - protein, 9 aa, Homo Sapiens
KSSVTVYRW

SEQ ID NO: 133275 - protein, 9 aa, Homo Sapiens
KSTAISLFY

SEQ ID NO: 133276 - protein, 9 aa, Homo Sapiens
KSTCVLEAF

SEQ ID NO: 133277 - protein, 9 aa, Homo Sapiens
KSTDVAKTF

SEQ ID NO: 133278 - protein, 9 aa, Homo Sapiens
KSTLINTLF

SEQ ID NO: 133279 - protein, 9 aa, Homo Sapiens
KSTPVTVVL

SEQ ID NO: 133280 - protein, 9 aa, Homo Sapiens
KSTQFEYAW

SEQ ID NO: 133281 - protein, 9 aa, Homo Sapiens
KSTTESYVF

SEQ ID NO: 133282 - protein, 9 aa, Homo Sapiens
KSTTTGHLI

SEQ ID NO: 133283 - protein, 9 aa, Homo Sapiens
KSTVNGVSW

SEQ ID NO: 133284 - protein, 9 aa, Homo Sapiens
KSVDVTEKL

SEQ ID NO: 133285 - protein, 9 aa, Homo Sapiens
KSVDWLLVF

SEQ ID NO: 133286 - protein, 9 aa, Homo Sapiens
KSVEEISTL

SEQ ID NO: 133287 - protein, 9 aa, Homo Sapiens
KSVEQYYGW

SEQ ID NO: 133288 - protein, 9 aa, Homo Sapiens
KSVGVFEAF

SEQ ID NO: 133289 - protein, 9 aa, Homo Sapiens
KSVKEISSY

SEQ ID NO: 133290 - protein, 9 aa, Homo Sapiens
KSVKEVLHF

SEQ ID NO: 133291 - protein, 9 aa, Homo Sapiens
KSVKVFAEY

SEQ ID NO: 133292 - protein, 9 aa, Homo Sapiens
KSVKVSENF

SEQ ID NO: 133293 - protein, 9 aa, Homo Sapiens
KSVKYTVNF

SEQ ID NO: 133294 - protein, 9 aa, Homo Sapiens
KSVLTNYRF

SEQ ID NO: 133295 - protein, 9 aa, Homo Sapiens
KSVLVKQTI

SEQ ID NO: 133296 - protein, 9 aa, Homo Sapiens
KSVRLDVTL

SEQ ID NO: 133297 - protein, 9 aa, Homo Sapiens
KSVRPGASY

SEQ ID NO: 133298 - protein, 9 aa, Homo Sapiens
KSVSFSDVF

SEQ ID NO: 133299 - protein, 9 aa, Homo Sapiens
KSVTAFFKW

SEQ ID NO: 133300 - protein, 9 aa, Homo Sapiens
KSVTAFFTW

SEQ ID NO: 133301 - protein, 9 aa, Homo Sapiens
KSVTEVDTL

SEQ ID NO: 133302 - protein, 9 aa, Homo Sapiens
KSVTLGYLF

SEQ ID NO: 133303 - protein, 9 aa, Homo Sapiens
KSVTQQIHF

SEQ ID NO: 133304 - protein, 9 aa, Homo Sapiens
KSWADVVKL

SEQ ID NO: 133305 - protein, 9 aa, Homo Sapiens
KSWVFGVHF

SEQ ID NO: 133306 - protein, 9 aa, Homo Sapiens
KSYPETHII

SEQ ID NO: 133307 - protein, 9 aa, Homo Sapiens
KSYSKAFTL

SEQ ID NO: 133308 - protein, 9 aa, Homo Sapiens
KSYVQGVTW

SEQ ID NO: 133309 - protein, 9 aa, Homo Sapiens
KTAAEQFKF

SEQ ID NO: 133310 - protein, 9 aa, Homo Sapiens
KTADVTKVW

SEQ ID NO: 133311 - protein, 9 aa, Homo Sapiens
KTAEAQLAY

SEQ ID NO: 133312 - protein, 9 aa, Homo Sapiens
KTAEDMNLF

SEQ ID NO: 133313 - protein, 9 aa, Homo Sapiens
KTAEELMNF

SEQ ID NO: 133314 - protein, 9 aa, Homo Sapiens
KTAPFDSRF

SEQ ID NO: 133315 - protein, 9 aa, Homo Sapiens
KTCKFVSSF

SEQ ID NO: 133316 - protein, 9 aa, Homo Sapiens
KTCSMKVHW

SEQ ID NO: 133317 - protein, 9 aa, Homo Sapiens
KTDKTLVLL

SEQ ID NO: 133318 - protein, 9 aa, Homo Sapiens
KTDVTVVRF

SEQ ID NO: 133319 - protein, 9 aa, Homo Sapiens
KTETEPVFW

SEQ ID NO: 133320 - protein, 9 aa, Homo Sapiens
KTFEEIWKF

SEQ ID NO: 133321 - protein, 9 aa, Homo Sapiens
KTFPFHFMF

SEQ ID NO: 133322 - protein, 9 aa, Homo Sapiens
KTFPSIHLW

SEQ ID NO: 133323 - protein, 9 aa, Homo Sapiens
KTFPYQHRY

SEQ ID NO: 133324 - protein, 9 aa, Homo Sapiens
KTFRDKNTL

SEQ ID NO: 133325 - protein, 9 aa, Homo Sapiens
KTFTGHREW

SEQ ID NO: 133326 - protein, 9 aa, Homo Sapiens
KTFTTQETI

SEQ ID NO: 133327 - protein, 9 aa, Homo Sapiens
KTFVQKQTL

SEQ ID NO: 133328 - protein, 9 aa, Homo Sapiens
KTGETMIQW

SEQ ID NO: 133329 - protein, 9 aa, Homo Sapiens
KTGLVSSTW

SEQ ID NO: 133330 - protein, 9 aa, Homo Sapiens
KTGPFVVHW

SEQ ID NO: 133331 - protein, 9 aa, Homo Sapiens
KTIDAMDTW

SEQ ID NO: 133332 - protein, 9 aa, Homo Sapiens
KTIEDFQQK

SEQ ID NO: 133333 - protein, 9 aa, Homo Sapiens
KTIEDVREF

SEQ ID NO: 133334 - protein, 9 aa, Homo Sapiens
KTIETSPSL

SEQ ID NO: 133335 - protein, 9 aa, Homo Sapiens
KTIGLREVW

SEQ ID NO: 133336 - protein, 9 aa, Homo Sapiens
KTIIITCSF

SEQ ID NO: 133337 - protein, 9 aa, Homo Sapiens
KTIKLWNTL

SEQ ID NO: 133338 - protein, 9 aa, Homo Sapiens
KTILPLINF

SEQ ID NO: 133339 - protein, 9 aa, Homo Sapiens
KTITQIEEF

SEQ ID NO: 133340 - protein, 9 aa, Homo Sapiens
KTIVMGASF

SEQ ID NO: 133341 - protein, 9 aa, Homo Sapiens
KTKEVIQEW

SEQ ID NO: 133342 - protein, 9 aa, Homo Sapiens
KTLDVDATY

SEQ ID NO: 133343 - protein, 9 aa, Homo Sapiens
KTLEEHSHW

SEQ ID NO: 133344 - protein, 9 aa, Homo Sapiens
KTLERSYLL

SEQ ID NO: 133345 - protein, 9 aa, Homo Sapiens
KTLESQNLF

SEQ ID NO: 133346 - protein, 9 aa, Homo Sapiens
KTLPDILTF

SEQ ID NO: 133347 - protein, 9 aa, Homo Sapiens
KTLYFHIYY

SEQ ID NO: 133348 - protein, 9 aa, Homo Sapiens
KTLYHITLW

SEQ ID NO: 133349 - protein, 9 aa, Homo Sapiens
KTMKQQLQF

SEQ ID NO: 133350 - protein, 9 aa, Homo Sapiens
KTMTDTYLL

SEQ ID NO: 133351 - protein, 9 aa, Homo Sapiens
KTNAIPLTL

SEQ ID NO: 133352 - protein, 9 aa, Homo Sapiens
KTNEMLLNF

SEQ ID NO: 133353 - protein, 9 aa, Homo Sapiens
KTNQVKMKY

SEQ ID NO: 133354 - protein, 9 aa, Homo Sapiens
KTNSLPLRF

SEQ ID NO: 133355 - protein, 9 aa, Homo Sapiens
KTQGPRALW

SEQ ID NO: 133356 - protein, 9 aa, Homo Sapiens
KTQILNEEW

SEQ ID NO: 133357 - protein, 9 aa, Homo Sapiens
KTRWIIEKY

SEQ ID NO: 133358 - protein, 9 aa, Homo Sapiens
KTSDRCLAW

SEQ ID NO: 133359 - protein, 9 aa, Homo Sapiens
KTSGIINKF

SEQ ID NO: 133360 - protein, 9 aa, Homo Sapiens
KTSKIELKF

SEQ ID NO: 133361 - protein, 9 aa, Homo Sapiens
KTSQTVATF

SEQ ID NO: 133362 - protein, 9 aa, Homo Sapiens
KTSRTFFYW

SEQ ID NO: 133363 - protein, 9 aa, Homo Sapiens
KTSVVVGTW

SEQ ID NO: 133364 - protein, 9 aa, Homo Sapiens
KTTECSNTF

SEQ ID NO: 133365 - protein, 9 aa, Homo Sapiens
KTTESHMDW

SEQ ID NO: 133366 - protein, 9 aa, Homo Sapiens
KTTNTVSKF

SEQ ID NO: 133367 - protein, 9 aa, Homo Sapiens
KTVAIHTLW

SEQ ID NO: 133368 - protein, 9 aa, Homo Sapiens
KTVDKFNEW

SEQ ID NO: 133369 - protein, 9 aa, Homo Sapiens
KTVEDYFCF

SEQ ID NO: 133370 - protein, 9 aa, Homo Sapiens
KTVEPLEYY

SEQ ID NO: 133371 - protein, 9 aa, Homo Sapiens
KTVQCKVTL

SEQ ID NO: 133372 - protein, 9 aa, Homo Sapiens
KTVSCFVNF

SEQ ID NO: 133373 - protein, 9 aa, Homo Sapiens
KTVVKELTW

SEQ ID NO: 133374 - protein, 9 aa, Homo Sapiens
KTVVNKDVF

SEQ ID NO: 133375 - protein, 9 aa, Homo Sapiens
KTYHYVPEF

SEQ ID NO: 133376 - protein, 9 aa, Homo Sapiens
KTYSLLHQW

SEQ ID NO: 133377 - protein, 9 aa, Homo Sapiens
KVADPVVTF

SEQ ID NO: 133378 - protein, 9 aa, Homo Sapiens
KVASALEKW

SEQ ID NO: 133379 - protein, 9 aa, Homo Sapiens
KVCDKAFAW

SEQ ID NO: 133380 - protein, 9 aa, Homo Sapiens
KVCDKAFVW

SEQ ID NO: 133381 - protein, 9 aa, Homo Sapiens
KVCGKAFKW

SEQ ID NO: 133382 - protein, 9 aa, Homo Sapiens
KVDDYSQEW

SEQ ID NO: 133383 - protein, 9 aa, Homo Sapiens
KVDIIISEW

SEQ ID NO: 133384 - protein, 9 aa, Homo Sapiens
KVFLIYEGY

SEQ ID NO: 133385 - protein, 9 aa, Homo Sapiens
KVGKFYELY

SEQ ID NO: 133386 - protein, 9 aa, Homo Sapiens
KVIEINPYL

SEQ ID NO: 133387 - protein, 9 aa, Homo Sapiens
KVIGAGKSW

SEQ ID NO: 133388 - protein, 9 aa, Homo Sapiens
KVINAAHSF

SEQ ID NO: 133389 - protein, 9 aa, Homo Sapiens
KVINETWAW

SEQ ID NO: 133390 - protein, 9 aa, Homo Sapiens
KVIPVVNSF

SEQ ID NO: 133391 - protein, 9 aa, Homo Sapiens
KVITCEIAW

SEQ ID NO: 133392 - protein, 9 aa, Homo Sapiens
KVLELFESF

SEQ ID NO: 133393 - protein, 9 aa, Homo Sapiens
KVLPIIQRW

SEQ ID NO: 133394 - protein, 9 aa, Homo Sapiens
KVMPFANLM

SEQ ID NO: 133395 - protein, 9 aa, Homo Sapiens
KVMPQNHSF

SEQ ID NO: 133396 - protein, 9 aa, Homo Sapiens
KVNGKGSLW

SEQ ID NO: 133397 - protein, 9 aa, Homo Sapiens
KVNKIEIHY

SEQ ID NO: 133398 - protein, 9 aa, Homo Sapiens
KVNKYGDTW

SEQ ID NO: 133399 - protein, 9 aa, Homo Sapiens
KVNVAKLRY

SEQ ID NO: 133400 - protein, 9 aa, Homo Sapiens
KVQDITMQW

SEQ ID NO: 133401 - protein, 9 aa, Homo Sapiens
KVRAELERW

SEQ ID NO: 133402 - protein, 9 aa, Homo Sapiens
KVSGVCKRW

SEQ ID NO: 133403 - protein, 9 aa, Homo Sapiens
KVSSINSRF

SEQ ID NO: 133404 - protein, 9 aa, Homo Sapiens
KVSTSRQTW

SEQ ID NO: 133405 - protein, 9 aa, Homo Sapiens
KVSVYLQNW

SEQ ID NO: 133406 - protein, 9 aa, Homo Sapiens
KVTIICIRF

SEQ ID NO: 133407 - protein, 9 aa, Homo Sapiens
KVTRIVLLW

SEQ ID NO: 133408 - protein, 9 aa, Homo Sapiens
KVVGKDYLL

SEQ ID NO: 133409 - protein, 9 aa, Homo Sapiens
KVVKFSYMW

SEQ ID NO: 133410 - protein, 9 aa, Homo Sapiens
KVVKVYQEW

SEQ ID NO: 133411 - protein, 9 aa, Homo Sapiens
KVVNIVPVI

SEQ ID NO: 133412 - protein, 9 aa, Homo Sapiens
KVWGEVGRW

SEQ ID NO: 133413 - protein, 9 aa, Homo Sapiens
KVWYNVENW

SEQ ID NO: 133414 - protein, 9 aa, Homo Sapiens
KVYFIYEGY

SEQ ID NO: 133415 - protein, 9 aa, Homo Sapiens
KVYMFKCVW

SEQ ID NO: 133416 - protein, 9 aa, Homo Sapiens
LAASVISKW

SEQ ID NO: 133417 - protein, 9 aa, Homo Sapiens
LADKVNSSW

SEQ ID NO: 133418 - protein, 9 aa, Homo Sapiens
LADPWRQEW

SEQ ID NO: 133419 - protein, 9 aa, Homo Sapiens
LAGPAATSW

SEQ ID NO: 133420 - protein, 9 aa, Homo Sapiens
LAHGADVNW

SEQ ID NO: 133421 - protein, 9 aa, Homo Sapiens
LALQLAHCW

SEQ ID NO: 133422 - protein, 9 aa, Homo Sapiens
LALVKPEVW

SEQ ID NO: 133423 - protein, 9 aa, Homo Sapiens
LANDVAEQW

SEQ ID NO: 133424 - protein, 9 aa, Homo Sapiens
LANKLYERW

SEQ ID NO: 133425 - protein, 9 aa, Homo Sapiens
LANKTPHTW

SEQ ID NO: 133426 - protein, 9 aa, Homo Sapiens
LANRFQLQL

SEQ ID NO: 133427 - protein, 9 aa, Homo Sapiens
LAQRVLLTW

SEQ ID NO: 133428 - protein, 9 aa, Homo Sapiens
LASKELAAW

SEQ ID NO: 133429 - protein, 9 aa, Homo Sapiens
LATKIQAAW

SEQ ID NO: 133430 - protein, 9 aa, Homo Sapiens
LATTILQHW

SEQ ID NO: 133431 - protein, 9 aa, Homo Sapiens
LAVPEEHVW

SEQ ID NO: 133432 - protein, 9 aa, Homo Sapiens
LAVPFCVNF

SEQ ID NO: 133433 - protein, 9 aa, Homo Sapiens
LAWSGVMEW

SEQ ID NO: 133434 - protein, 9 aa, Homo Sapiens
LDTNADKQL

SEQ ID NO: 133435 - protein, 9 aa, Homo Sapiens
LGGPGSFYW

SEQ ID NO: 133436 - protein, 9 aa, Homo Sapiens
LGNSLLLKY

SEQ ID NO: 133437 - protein, 9 aa, Homo Sapiens
LIVTTPEKW

SEQ ID NO: 133438 - protein, 9 aa, Homo Sapiens
LLNPVIYTW

SEQ ID NO: 133439 - protein, 9 aa, Homo Sapiens
LLSPVSVEW

SEQ ID NO: 133440 - protein, 9 aa, Homo Sapiens
LPINGNGKQ

SEQ ID NO: 133441 - protein, 9 aa, Homo Sapiens
LQVSAKIGF

SEQ ID NO: 133442 - protein, 9 aa, Homo Sapiens
LSAAEVMQW

SEQ ID NO: 133443 - protein, 9 aa, Homo Sapiens
LSALESTKW

SEQ ID NO: 133444 - protein, 9 aa, Homo Sapiens
LSAPIHTQM

SEQ ID NO: 133445 - protein, 9 aa, Homo Sapiens
LSAPIMSRF

SEQ ID NO: 133446 - protein, 9 aa, Homo Sapiens
LSAPNLNSW

SEQ ID NO: 133447 - protein, 9 aa, Homo Sapiens
LSDETKNNW

SEQ ID NO: 133448 - protein, 9 aa, Homo Sapiens
LSDQHPLTW

SEQ ID NO: 133449 - protein, 9 aa, Homo Sapiens
LSDSPGPTW

SEQ ID NO: 133450 - protein, 9 aa, Homo Sapiens
LSDSQLKVW

SEQ ID NO: 133451 - protein, 9 aa, Homo Sapiens
LSEAVHWTW

SEQ ID NO: 133452 - protein, 9 aa, Homo Sapiens
LSFHQGCTI

SEQ ID NO: 133453 - protein, 9 aa, Homo Sapiens
LSFLGGIRW

SEQ ID NO: 133454 - protein, 9 aa, Homo Sapiens
LSGATVTLW

SEQ ID NO: 133455 - protein, 9 aa, Homo Sapiens
LSGPFVQKW

SEQ ID NO: 133456 - protein, 9 aa, Homo Sapiens
LSGRSTPKL

SEQ ID NO: 133457 - protein, 9 aa, Homo Sapiens
LSHKGNEFW

SEQ ID NO: 133458 - protein, 9 aa, Homo Sapiens
LSIHLQHKF

SEQ ID NO: 133459 - protein, 9 aa, Homo Sapiens
LSIITKDLF

SEQ ID NO: 133460 - protein, 9 aa, Homo Sapiens
LSIVDRTTI

SEQ ID NO: 133461 - protein, 9 aa, Homo Sapiens
LSNKISPLM

SEQ ID NO: 133462 - protein, 9 aa, Homo Sapiens
LSNLESTHW

SEQ ID NO: 133463 - protein, 9 aa, Homo Sapiens
LSNTVMPRF

SEQ ID NO: 133464 - protein, 9 aa, Homo Sapiens
LSNVQRLTF

SEQ ID NO: 133465 - protein, 9 aa, Homo Sapiens
LSQKLQMIL

SEQ ID NO: 133466 - protein, 9 aa, Homo Sapiens
LSQPKIVKW

SEQ ID NO: 133467 - protein, 9 aa, Homo Sapiens
LSSEVTKNW

SEQ ID NO: 133468 - protein, 9 aa, Homo Sapiens
LSSPEPLSW

SEQ ID NO: 133469 - protein, 9 aa, Homo Sapiens
LSSTEILKW

SEQ ID NO: 133470 - protein, 9 aa, Homo Sapiens
LSSTVTLEH

SEQ ID NO: 133471 - protein, 9 aa, Homo Sapiens
LSSVTQLHL

SEQ ID NO: 133472 - protein, 9 aa, Homo Sapiens
LSTIISPLF

SEQ ID NO: 133473 - protein, 9 aa, Homo Sapiens
LSTIKQLLW

SEQ ID NO: 133474 - protein, 9 aa, Homo Sapiens
LSTLHTVLW

SEQ ID NO: 133475 - protein, 9 aa, Homo Sapiens
LSTLVRPVF

SEQ ID NO: 133476 - protein, 9 aa, Homo Sapiens
LSTTIQEEF

SEQ ID NO: 133477 - protein, 9 aa, Homo Sapiens
LSTTVQPNL

SEQ ID NO: 133478 - protein, 9 aa, Homo Sapiens
LSVFSTSKW

SEQ ID NO: 133479 - protein, 9 aa, Homo Sapiens
LSVPSPFTW

SEQ ID NO: 133480 - protein, 9 aa, Homo Sapiens
LTFPVAMFW

SEQ ID NO: 133481 - protein, 9 aa, Homo Sapiens
LTIDHVPIW

SEQ ID NO: 133482 - protein, 9 aa, Homo Sapiens
LTLQQTQRW

SEQ ID NO: 133483 - protein, 9 aa, Homo Sapiens
LTMTRNAVW

SEQ ID NO: 133484 - protein, 9 aa, Homo Sapiens
LTNTIHCRL

SEQ ID NO: 133485 - protein, 9 aa, Homo Sapiens
LTPVVVTLW

SEQ ID NO: 133486 - protein, 9 aa, Homo Sapiens
LTSPDSEKW

SEQ ID NO: 133487 - protein, 9 aa, Homo Sapiens
LTSPIEASW

SEQ ID NO: 133488 - protein, 9 aa, Homo Sapiens
LTSTLQQDW

SEQ ID NO: 133489 - protein, 9 aa, Homo Sapiens
LTSVVQTLL

SEQ ID NO: 133490 - protein, 9 aa, Homo Sapiens
LTTEVHPEL

SEQ ID NO: 133491 - protein, 9 aa, Homo Sapiens
LTYENVERW

SEQ ID NO: 133492 - protein, 9 aa, Homo Sapiens
LVHAVQALW

SEQ ID NO: 133493 - protein, 9 aa, Homo Sapiens
LVNNTPLNW

SEQ ID NO: 133494 - protein, 9 aa, Homo Sapiens
LVSDLQQVW

SEQ ID NO: 133495 - protein, 9 aa, Homo Sapiens
LVWQVQEKW

SEQ ID NO: 133496 - protein, 9 aa, Homo Sapiens
MAAKILEEF

SEQ ID NO: 133497 - protein, 9 aa, Homo Sapiens
MAIEAQQKF

SEQ ID NO: 133498 - protein, 9 aa, Homo Sapiens
MAIVGTHKF

SEQ ID NO: 133499 - protein, 9 aa, Homo Sapiens
MANPTALLL

SEQ ID NO: 133500 - protein, 9 aa, Homo Sapiens
MGNPFLTQW

SEQ ID NO: 133501 - protein, 9 aa, Homo Sapiens
MMFAVHCTW

SEQ ID NO: 133502 - protein, 9 aa, Homo Sapiens
MSERQLALW

SEQ ID NO: 133503 - protein, 9 aa, Homo Sapiens
MSERQVALW

SEQ ID NO: 133504 - protein, 9 aa, Homo Sapiens
MSLPLTARW

SEQ ID NO: 133505 - protein, 9 aa, Homo Sapiens
MSLPYRLVF

SEQ ID NO: 133506 - protein, 9 aa, Homo Sapiens
MSNKHGWTW

SEQ ID NO: 133507 - protein, 9 aa, Homo Sapiens
MSTEHRGPV

SEQ ID NO: 133508 - protein, 9 aa, Homo Sapiens
MSVHLSPCF

SEQ ID NO: 133509 - protein, 9 aa, Homo Sapiens
MTDPKLITW

SEQ ID NO: 133510 - protein, 9 aa, Homo Sapiens
MTLKDIYTW

SEQ ID NO: 133511 - protein, 9 aa, Homo Sapiens
MTNGFHMTW

SEQ ID NO: 133512 - protein, 9 aa, Homo Sapiens
MTNPHNHLY

SEQ ID NO: 133513 - protein, 9 aa, Homo Sapiens
MTVKEQQEW

SEQ ID NO: 133514 - protein, 9 aa, Homo Sapiens
MTWSHNDMW

SEQ ID NO: 133515 - protein, 9 aa, Homo Sapiens
MVLDIVQHW

SEQ ID NO: 133516 - protein, 9 aa, Homo Sapiens
NSLVDKTSW

SEQ ID NO: 133517 - protein, 9 aa, Homo Sapiens
NSSAFQHFW

SEQ ID NO: 133518 - protein, 9 aa, Homo Sapiens
NSSAVLLQW

SEQ ID NO: 133519 - protein, 9 aa, Homo Sapiens
NTAVVPQGW

SEQ ID NO: 133520 - protein, 9 aa, Homo Sapiens
NTTAIAEAW

SEQ ID NO: 133521 - protein, 9 aa, Homo Sapiens
NTTAVAEAW

SEQ ID NO: 133522 - protein, 9 aa, Homo Sapiens
PSSSPTHLW

SEQ ID NO: 133523 - protein, 9 aa, Homo Sapiens
QAFPNTNRW

SEQ ID NO: 133524 - protein, 9 aa, Homo Sapiens
QAIKLLVRW

SEQ ID NO: 133525 - protein, 9 aa, Homo Sapiens
QALISQHLW

SEQ ID NO: 133526 - protein, 9 aa, Homo Sapiens
QATRTVPVF

SEQ ID NO: 133527 - protein, 9 aa, Homo Sapiens
QAVPCSVTW

SEQ ID NO: 133528 - protein, 9 aa, Homo Sapiens
QINAKVAEW

SEQ ID NO: 133529 - protein, 9 aa, Homo Sapiens
QITAGRHGD

SEQ ID NO: 133530 - protein, 9 aa, Homo Sapiens
QMVKKNFEW

SEQ ID NO: 133531 - protein, 9 aa, Homo Sapiens
QSAKEQIKW

SEQ ID NO: 133532 - protein, 9 aa, Homo Sapiens
QSAKTQIKL

SEQ ID NO: 133533 - protein, 9 aa, Homo Sapiens
QSFKPETYW

SEQ ID NO: 133534 - protein, 9 aa, Homo Sapiens
QSGIVQLLW

SEQ ID NO: 133535 - protein, 9 aa, Homo Sapiens
QSLKSTAKW

SEQ ID NO: 133536 - protein, 9 aa, Homo Sapiens
QSSHLNVHW

SEQ ID NO: 133537 - protein, 9 aa, Homo Sapiens
QSSPPTVEW

SEQ ID NO: 133538 - protein, 9 aa, Homo Sapiens
QSSWSHFGW

SEQ ID NO: 133539 - protein, 9 aa, Homo Sapiens
QSVEPLTGW

SEQ ID NO: 133540 - protein, 9 aa, Homo Sapiens
QSVHFQTIF

SEQ ID NO: 133541 - protein, 9 aa, Homo Sapiens
QSVQEHCTF

SEQ ID NO: 133542 - protein, 9 aa, Homo Sapiens
QTCRLLLSY

SEQ ID NO: 133543 - protein, 9 aa, Homo Sapiens
QTFSSKTEW

SEQ ID NO: 133544 - protein, 9 aa, Homo Sapiens
QTNDVLLTF

SEQ ID NO: 133545 - protein, 9 aa, Homo Sapiens
QTSRYKLHY

SEQ ID NO: 133546 - protein, 9 aa, Homo Sapiens
QTSSIVECW

SEQ ID NO: 133547 - protein, 9 aa, Homo Sapiens
QTVMITPTF

SEQ ID NO: 133548 - protein, 9 aa, Homo Sapiens
QTVSPAEKW

SEQ ID NO: 133549 - protein, 9 aa, Homo Sapiens
QTYYRIFTW

SEQ ID NO: 133550 - protein, 9 aa, Homo Sapiens
RAADVLVYL

SEQ ID NO: 133551 - protein, 9 aa, Homo Sapiens
RAAFVLPEF

SEQ ID NO: 133552 - protein, 9 aa, Homo Sapiens
RAAIMQALW

SEQ ID NO: 133553 - protein, 9 aa, Homo Sapiens
RAAPFSLEY

SEQ ID NO: 133554 - protein, 9 aa, Homo Sapiens
RACQFLIKF

SEQ ID NO: 133555 - protein, 9 aa, Homo Sapiens
RAIAALSFW

SEQ ID NO: 133556 - protein, 9 aa, Homo Sapiens
RAIELQPHF

SEQ ID NO: 133557 - protein, 9 aa, Homo Sapiens
RAIFLPQAW

SEQ ID NO: 133558 - protein, 9 aa, Homo Sapiens
RAIQFYLEF

SEQ ID NO: 133559 - protein, 9 aa, Homo Sapiens
RAIQINPAF

SEQ ID NO: 133560 - protein, 9 aa, Homo Sapiens
RAIYQCFVW

SEQ ID NO: 133561 - protein, 9 aa, Homo Sapiens
RAIYTIMRW

SEQ ID NO: 133562 - protein, 9 aa, Homo Sapiens
RALKEITTF

SEQ ID NO: 133563 - protein, 9 aa, Homo Sapiens
RAQETFMQW

SEQ ID NO: 133564 - protein, 9 aa, Homo Sapiens
RARTIYERF

SEQ ID NO: 133565 - protein, 9 aa, Homo Sapiens
RASPFLLQY

SEQ ID NO: 133566 - protein, 9 aa, Homo Sapiens
RASQVQSKL

SEQ ID NO: 133567 - protein, 9 aa, Homo Sapiens
RATHVTDFF

SEQ ID NO: 133568 - protein, 9 aa, Homo Sapiens
RATPENYLF

SEQ ID NO: 133569 - protein, 9 aa, Homo Sapiens
RAVEYNALF

SEQ ID NO: 133570 - protein, 9 aa, Homo Sapiens
RAVGLVSTW

SEQ ID NO: 133571 - protein, 9 aa, Homo Sapiens
RAVQLQELW

SEQ ID NO: 133572 - protein, 9 aa, Homo Sapiens
RAYAKDVKF

SEQ ID NO: 133573 - protein, 9 aa, Homo Sapiens
RAYPFHWAW

SEQ ID NO: 133574 - protein, 9 aa, Homo Sapiens
RGADIDQQW

SEQ ID NO: 133575 - protein, 9 aa, Homo Sapiens
RGAGPAPAW

SEQ ID NO: 133576 - protein, 9 aa, Homo Sapiens
RGAQVEEIW

SEQ ID NO: 133577 - protein, 9 aa, Homo Sapiens
RGCDVTFEW

SEQ ID NO: 133578 - protein, 9 aa, Homo Sapiens
RGCDYIVLW

SEQ ID NO: 133579 - protein, 9 aa, Homo Sapiens
RGISVENSW

SEQ ID NO: 133580 - protein, 9 aa, Homo Sapiens
RGNPLVVRF

SEQ ID NO: 133581 - protein, 9 aa, Homo Sapiens
RGTVIVERW

SEQ ID NO: 133582 - protein, 9 aa, Homo Sapiens
RGVPWNFTF

SEQ ID NO: 133583 - protein, 9 aa, Homo Sapiens
RIAPSGDQW

SEQ ID NO: 133584 - protein, 9 aa, Homo Sapiens
RICSKAHSW

SEQ ID NO: 133585 - protein, 9 aa, Homo Sapiens
RIEPSVSLW

SEQ ID NO: 133586 - protein, 9 aa, Homo Sapiens
RIIAKLAAW

SEQ ID NO: 133587 - protein, 9 aa, Homo Sapiens
RIIHLVHRF

SEQ ID NO: 133588 - protein, 9 aa, Homo Sapiens
RIILDKLNW

SEQ ID NO: 133589 - protein, 9 aa, Homo Sapiens
RIINRFHSF

SEQ ID NO: 133590 - protein, 9 aa, Homo Sapiens
RIIYIREQW

SEQ ID NO: 133591 - protein, 9 aa, Homo Sapiens
RILVDQQVW

SEQ ID NO: 133592 - protein, 9 aa, Homo Sapiens
RILVEKRCW

SEQ ID NO: 133593 - protein, 9 aa, Homo Sapiens
RINQTVTFW

SEQ ID NO: 133594 - protein, 9 aa, Homo Sapiens
RITPEFSKW

SEQ ID NO: 133595 - protein, 9 aa, Homo Sapiens
RIVEPYIAW

SEQ ID NO: 133596 - protein, 9 aa, Homo Sapiens
RIVEPYVTW

SEQ ID NO: 133597 - protein, 9 aa, Homo Sapiens
RLDPNVQKW

SEQ ID NO: 133598 - protein, 9 aa, Homo Sapiens
RLFGAVVRW

SEQ ID NO: 133599 - protein, 9 aa, Homo Sapiens
RLFVGEPVW

SEQ ID NO: 133600 - protein, 9 aa, Homo Sapiens
RLLDLHQSW

SEQ ID NO: 133601 - protein, 9 aa, Homo Sapiens
RLNPLVLLL

SEQ ID NO: 133602 - protein, 9 aa, Homo Sapiens
RMAPPQNQW

SEQ ID NO: 133603 - protein, 9 aa, Homo Sapiens
RMEEEQHHW

SEQ ID NO: 133604 - protein, 9 aa, Homo Sapiens
RMFAPTKTW

SEQ ID NO: 133605 - protein, 9 aa, Homo Sapiens
RMFLENETW

SEQ ID NO: 133606 - protein, 9 aa, Homo Sapiens
RMIDIQTRM

SEQ ID NO: 133607 - protein, 9 aa, Homo Sapiens
RMNCVLATY

SEQ ID NO: 133608 - protein, 9 aa, Homo Sapiens
RMNEVISLW

SEQ ID NO: 133609 - protein, 9 aa, Homo Sapiens
RMNPNSPSI

SEQ ID NO: 133610 - protein, 9 aa, Homo Sapiens
RNLPFDFTW

SEQ ID NO: 133611 - protein, 9 aa, Homo Sapiens
RSAAYAARW

SEQ ID NO: 133612 - protein, 9 aa, Homo Sapiens
RSAICIQSW

SEQ ID NO: 133613 - protein, 9 aa, Homo Sapiens
RSAPCSPVL

SEQ ID NO: 133614 - protein, 9 aa, Homo Sapiens
RSAQAIHKF

SEQ ID NO: 133615 - protein, 9 aa, Homo Sapiens
RSAVGFLFW

SEQ ID NO: 133616 - protein, 9 aa, Homo Sapiens
RSAVVEMLI

SEQ ID NO: 133617 - protein, 9 aa, Homo Sapiens
RSCPEEQYW

SEQ ID NO: 133618 - protein, 9 aa, Homo Sapiens
RSDGLLQLW

SEQ ID NO: 133619 - protein, 9 aa, Homo Sapiens
RSDIGEFEW

SEQ ID NO: 133620 - protein, 9 aa, Homo Sapiens
RSDPGHYSF

SEQ ID NO: 133621 - protein, 9 aa, Homo Sapiens
RSDPSIMNW

SEQ ID NO: 133622 - protein, 9 aa, Homo Sapiens
RSEVILEKW

SEQ ID NO: 133623 - protein, 9 aa, Homo Sapiens
RSFFHQHYL

SEQ ID NO: 133624 - protein, 9 aa, Homo Sapiens
RSFHGQCQL

SEQ ID NO: 133625 - protein, 9 aa, Homo Sapiens
RSFLDDPIW

SEQ ID NO: 133626 - protein, 9 aa, Homo Sapiens
RSFLTKLEW

SEQ ID NO: 133627 - protein, 9 aa, Homo Sapiens
RSFPGFQAF

SEQ ID NO: 133628 - protein, 9 aa, Homo Sapiens
RSFQMQYNL

SEQ ID NO: 133629 - protein, 9 aa, Homo Sapiens
RSFVEKHRW

SEQ ID NO: 133630 - protein, 9 aa, Homo Sapiens
RSGPFGQIF

SEQ ID NO: 133631 - protein, 9 aa, Homo Sapiens
RSHDTLVRW

SEQ ID NO: 133632 - protein, 9 aa, Homo Sapiens
RSHGFAAEF

SEQ ID NO: 133633 - protein, 9 aa, Homo Sapiens
RSHPNKQLW

SEQ ID NO: 133634 - protein, 9 aa, Homo Sapiens
RSIAGIDQW

SEQ ID NO: 133635 - protein, 9 aa, Homo Sapiens
RSIGWGEEF

SEQ ID NO: 133636 - protein, 9 aa, Homo Sapiens
RSILAPLAW

SEQ ID NO: 133637 - protein, 9 aa, Homo Sapiens
RSIPVLAKW

SEQ ID NO: 133638 - protein, 9 aa, Homo Sapiens
RSIPVWIKI

SEQ ID NO: 133639 - protein, 9 aa, Homo Sapiens
RSIQQGFCF

SEQ ID NO: 133640 - protein, 9 aa, Homo Sapiens
RSISDKQQW

SEQ ID NO: 133641 - protein, 9 aa, Homo Sapiens
RSIVNQVRF

SEQ ID NO: 133642 - protein, 9 aa, Homo Sapiens
RSKQTKELW

SEQ ID NO: 133643 - protein, 9 aa, Homo Sapiens
RSLAYIHSF

SEQ ID NO: 133644 - protein, 9 aa, Homo Sapiens
RSLDQQMYL

SEQ ID NO: 133645 - protein, 9 aa, Homo Sapiens
RSLEISQSY

SEQ ID NO: 133646 - protein, 9 aa, Homo Sapiens
RSLGFNTQI

SEQ ID NO: 133647 - protein, 9 aa, Homo Sapiens
RSLGVHLSF

SEQ ID NO: 133648 - protein, 9 aa, Homo Sapiens
RSLLQENNW

SEQ ID NO: 133649 - protein, 9 aa, Homo Sapiens
RSLPASQAW

SEQ ID NO: 133650 - protein, 9 aa, Homo Sapiens
RSLPEIWTL

SEQ ID NO: 133651 - protein, 9 aa, Homo Sapiens
RSLQLHLVF

SEQ ID NO: 133652 - protein, 9 aa, Homo Sapiens
RSLQTICSW

SEQ ID NO: 133653 - protein, 9 aa, Homo Sapiens
RSLSTTNVF

SEQ ID NO: 133654 - protein, 9 aa, Homo Sapiens
RSLVPIQLW

SEQ ID NO: 133655 - protein, 9 aa, Homo Sapiens
RSMDQGSTW

SEQ ID NO: 133656 - protein, 9 aa, Homo Sapiens
RSMEDFVTW

SEQ ID NO: 133657 - protein, 9 aa, Homo Sapiens
RSMGLPLQF

SEQ ID NO: 133658 - protein, 9 aa, Homo Sapiens
RSMVLKLTL

SEQ ID NO: 133659 - protein, 9 aa, Homo Sapiens
RSNILTLMY

SEQ ID NO: 133660 - protein, 9 aa, Homo Sapiens
RSNIMTLLF

SEQ ID NO: 133661 - protein, 9 aa, Homo Sapiens
RSNNINTLF

SEQ ID NO: 133662 - protein, 9 aa, Homo Sapiens
RSNSFNSTF

SEQ ID NO: 133663 - protein, 9 aa, Homo Sapiens
RSQEKCYLF

SEQ ID NO: 133664 - protein, 9 aa, Homo Sapiens
RSQPQHFTY

SEQ ID NO: 133665 - protein, 9 aa, Homo Sapiens
RSQVDHVIW

SEQ ID NO: 133666 - protein, 9 aa, Homo Sapiens
RSSDSWEVW

SEQ ID NO: 133667 - protein, 9 aa, Homo Sapiens
RSSGRVYYF

SEQ ID NO: 133668 - protein, 9 aa, Homo Sapiens
RSSNVSYKY

SEQ ID NO: 133669 - protein, 9 aa, Homo Sapiens
RSSPVEYEF

SEQ ID NO: 133670 - protein, 9 aa, Homo Sapiens
RSSTPLPTI

SEQ ID NO: 133671 - protein, 9 aa, Homo Sapiens
RSSVILLTY

SEQ ID NO: 133672 - protein, 9 aa, Homo Sapiens
RSTDRVLQW

SEQ ID NO: 133673 - protein, 9 aa, Homo Sapiens
RSTELDSNW

SEQ ID NO: 133674 - protein, 9 aa, Homo Sapiens
RSTQITVRF

SEQ ID NO: 133675 - protein, 9 aa, Homo Sapiens
RSTQQTTEW

SEQ ID NO: 133676 - protein, 9 aa, Homo Sapiens
RSTVAEHLW

SEQ ID NO: 133677 - protein, 9 aa, Homo Sapiens
RSTVLTPMF

SEQ ID NO: 133678 - protein, 9 aa, Homo Sapiens
RSVDEVNYW

SEQ ID NO: 133679 - protein, 9 aa, Homo Sapiens
RSVDLQTRI

SEQ ID NO: 133680 - protein, 9 aa, Homo Sapiens
RSVLHHFHF

SEQ ID NO: 133681 - protein, 9 aa, Homo Sapiens
RSVPLKATF

SEQ ID NO: 133682 - protein, 9 aa, Homo Sapiens
RSVPTSTVF

SEQ ID NO: 133683 - protein, 9 aa, Homo Sapiens
RSVRLYHLL

SEQ ID NO: 133684 - protein, 9 aa, Homo Sapiens
RSWDHNEFF

SEQ ID NO: 133685 - protein, 9 aa, Homo Sapiens
RSWVEQDHW

SEQ ID NO: 133686 - protein, 9 aa, Homo Sapiens
RSYDYQFRY

SEQ ID NO: 133687 - protein, 9 aa, Homo Sapiens
RSYLQDPIW

SEQ ID NO: 133688 - protein, 9 aa, Homo Sapiens
RSYSQQLFL

SEQ ID NO: 133689 - protein, 9 aa, Homo Sapiens
RTAHTFESW

SEQ ID NO: 133690 - protein, 9 aa, Homo Sapiens
RTAHVILRY

SEQ ID NO: 133691 - protein, 9 aa, Homo Sapiens
RTAITTPNF

SEQ ID NO: 133692 - protein, 9 aa, Homo Sapiens
RTAKLQVTL

SEQ ID NO: 133693 - protein, 9 aa, Homo Sapiens
RTAQEVETY

SEQ ID NO: 133694 - protein, 9 aa, Homo Sapiens
RTATFQQRF

SEQ ID NO: 133695 - protein, 9 aa, Homo Sapiens
RTDGKVFQF

SEQ ID NO: 133696 - protein, 9 aa, Homo Sapiens
RTDGRCLIW

SEQ ID NO: 133697 - protein, 9 aa, Homo Sapiens
RTDSSHQAW

SEQ ID NO: 133698 - protein, 9 aa, Homo Sapiens
RTEKTMATW

SEQ ID NO: 133699 - protein, 9 aa, Homo Sapiens
RTEVVQTLW

SEQ ID NO: 133700 - protein, 9 aa, Homo Sapiens
RTFPDPTSW

SEQ ID NO: 133701 - protein, 9 aa, Homo Sapiens
RTGHILVQW

SEQ ID NO: 133702 - protein, 9 aa, Homo Sapiens
RTGHTVLTW

SEQ ID NO: 133703 - protein, 9 aa, Homo Sapiens
RTIEDFNKF

SEQ ID NO: 133704 - protein, 9 aa, Homo Sapiens
RTKEEVNEW

SEQ ID NO: 133705 - protein, 9 aa, Homo Sapiens
RTLDFDPLL

SEQ ID NO: 133706 - protein, 9 aa, Homo Sapiens
RTLDNQLFF

SEQ ID NO: 133707 - protein, 9 aa, Homo Sapiens
RTLMENQHW

SEQ ID NO: 133708 - protein, 9 aa, Homo Sapiens
RTLPVLLLY

SEQ ID NO: 133709 - protein, 9 aa, Homo Sapiens
RTLRDIETF

SEQ ID NO: 133710 - protein, 9 aa, Homo Sapiens
RTMEIESTF

SEQ ID NO: 133711 - protein, 9 aa, Homo Sapiens
RTMEWVQTI

SEQ ID NO: 133712 - protein, 9 aa, Homo Sapiens
RTNAIKQTF

SEQ ID NO: 133713 - protein, 9 aa, Homo Sapiens
RTNGVLLFI

SEQ ID NO: 133714 - protein, 9 aa, Homo Sapiens
RTNNIELHY

SEQ ID NO: 133715 - protein, 9 aa, Homo Sapiens
RTNTAYQCF

SEQ ID NO: 133716 - protein, 9 aa, Homo Sapiens
RTSDKELYF

SEQ ID NO: 133717 - protein, 9 aa, Homo Sapiens
RTSETNTLF

SEQ ID NO: 133718 - protein, 9 aa, Homo Sapiens
RTSLIGEEW

SEQ ID NO: 133719 - protein, 9 aa, Homo Sapiens
RTSPSGGTW

SEQ ID NO: 133720 - protein, 9 aa, Homo Sapiens
RTSRTLLLL

SEQ ID NO: 133721 - protein, 9 aa, Homo Sapiens
RTSTSQAVF

SEQ ID NO: 133722 - protein, 9 aa, Homo Sapiens
RTTDEVYLF

SEQ ID NO: 133723 - protein, 9 aa, Homo Sapiens
RTTDIVIRI

SEQ ID NO: 133724 - protein, 9 aa, Homo Sapiens
RTTDLLTDW

SEQ ID NO: 133725 - protein, 9 aa, Homo Sapiens
RTTPIAMSF

SEQ ID NO: 133726 - protein, 9 aa, Homo Sapiens
RTTQIYTYF

SEQ ID NO: 133727 - protein, 9 aa, Homo Sapiens
RTTTVESSF

SEQ ID NO: 133728 - protein, 9 aa, Homo Sapiens
RTVAALASW

SEQ ID NO: 133729 - protein, 9 aa, Homo Sapiens
RTVALTALL

SEQ ID NO: 133730 - protein, 9 aa, Homo Sapiens
RTVEDFNKF

SEQ ID NO: 133731 - protein, 9 aa, Homo Sapiens
RTVEKPPKF

SEQ ID NO: 133732 - protein, 9 aa, Homo Sapiens
RTVEKTWKL

SEQ ID NO: 133733 - protein, 9 aa, Homo Sapiens
RTVIIEQSW

SEQ ID NO: 133734 - protein, 9 aa, Homo Sapiens
RTVNVEDSW

SEQ ID NO: 133735 - protein, 9 aa, Homo Sapiens
RTVPFCSTF

SEQ ID NO: 133736 - protein, 9 aa, Homo Sapiens
RTVYFSEQW

SEQ ID NO: 133737 - protein, 9 aa, Homo Sapiens
RTYEHEAMW

SEQ ID NO: 133738 - protein, 9 aa, Homo Sapiens
RTYFVANEW

SEQ ID NO: 133739 - protein, 9 aa, Homo Sapiens
RTYPVQEYF

SEQ ID NO: 133740 - protein, 9 aa, Homo Sapiens
RVAAVLLQF

SEQ ID NO: 133741 - protein, 9 aa, Homo Sapiens
RVAHFGYHW

SEQ ID NO: 133742 - protein, 9 aa, Homo Sapiens
RVCGKAFRW

SEQ ID NO: 133743 - protein, 9 aa, Homo Sapiens
RVDGAVSSW

SEQ ID NO: 133744 - protein, 9 aa, Homo Sapiens
RVEGAQQRW

SEQ ID NO: 133745 - protein, 9 aa, Homo Sapiens
RVFDLPLTW

SEQ ID NO: 133746 - protein, 9 aa, Homo Sapiens
RVFDNQDTW

SEQ ID NO: 133747 - protein, 9 aa, Homo Sapiens
RVFLMDPAW

SEQ ID NO: 133748 - protein, 9 aa, Homo Sapiens
RVFPHEVNW

SEQ ID NO: 133749 - protein, 9 aa, Homo Sapiens
RVHAFLEQW

SEQ ID NO: 133750 - protein, 9 aa, Homo Sapiens
RVHKDGSLW

SEQ ID NO: 133751 - protein, 9 aa, Homo Sapiens
RVHPETYEW

SEQ ID NO: 133752 - protein, 9 aa, Homo Sapiens
RVIDVGSEW

SEQ ID NO: 133753 - protein, 9 aa, Homo Sapiens
RVIEFAAKF

SEQ ID NO: 133754 - protein, 9 aa, Homo Sapiens
RVLISTDVW

SEQ ID NO: 133755 - protein, 9 aa, Homo Sapiens
RVLPCNHEF

SEQ ID NO: 133756 - protein, 9 aa, Homo Sapiens
RVMPSSFFL

SEQ ID NO: 133757 - protein, 9 aa, Homo Sapiens
RVNPVEYSI

SEQ ID NO: 133758 - protein, 9 aa, Homo Sapiens
RVQGFQVEY

SEQ ID NO: 133759 - protein, 9 aa, Homo Sapiens
RVSELQVLL

SEQ ID NO: 133760 - protein, 9 aa, Homo Sapiens
RVSNIRQVF

SEQ ID NO: 133761 - protein, 9 aa, Homo Sapiens
RVSQLQIQF

SEQ ID NO: 133762 - protein, 9 aa, Homo Sapiens
RVTSVVTGF

SEQ ID NO: 133763 - protein, 9 aa, Homo Sapiens
RVVDFDETW

SEQ ID NO: 133764 - protein, 9 aa, Homo Sapiens
RVVDIYSKF

SEQ ID NO: 133765 - protein, 9 aa, Homo Sapiens
RVVELQQTL

SEQ ID NO: 133766 - protein, 9 aa, Homo Sapiens
RVVIFDPSW

SEQ ID NO: 133767 - protein, 9 aa, Homo Sapiens
RVVQQEEGW

SEQ ID NO: 133768 - protein, 9 aa, Homo Sapiens
RVWNLNHLW

SEQ ID NO: 133769 - protein, 9 aa, Homo Sapiens
RVWQWDEKW

SEQ ID NO: 133770 - protein, 9 aa, Homo Sapiens
RVYPQAVYF

SEQ ID NO: 133771 - protein, 9 aa, Homo Sapiens
SAANIQPIF

SEQ ID NO: 133772 - protein, 9 aa, Homo Sapiens
SAAPKPTSW

SEQ ID NO: 133773 - protein, 9 aa, Homo Sapiens
SAAPLFFSW

SEQ ID NO: 133774 - protein, 9 aa, Homo Sapiens
SAARLYYYW

SEQ ID NO: 133775 - protein, 9 aa, Homo Sapiens
SADGTIKLW

SEQ ID NO: 133776 - protein, 9 aa, Homo Sapiens
SADHLIILW

SEQ ID NO: 133777 - protein, 9 aa, Homo Sapiens
SADKTVALW

SEQ ID NO: 133778 - protein, 9 aa, Homo Sapiens
SADKTVKLW

SEQ ID NO: 133779 - protein, 9 aa, Homo Sapiens
SADNTVILW

SEQ ID NO: 133780 - protein, 9 aa, Homo Sapiens
SADRFVYVW

SEQ ID NO: 133781 - protein, 9 aa, Homo Sapiens
SADRTVKLW

SEQ ID NO: 133782 - protein, 9 aa, Homo Sapiens
SADRTVTLW

SEQ ID NO: 133783 - protein, 9 aa, Homo Sapiens
SAIRYQEVW

SEQ ID NO: 133784 - protein, 9 aa, Homo Sapiens
SALRGEPLW

SEQ ID NO: 133785 - protein, 9 aa, Homo Sapiens
SASEVLKEW

SEQ ID NO: 133786 - protein, 9 aa, Homo Sapiens
SASKPLASW

SEQ ID NO: 133787 - protein, 9 aa, Homo Sapiens
SASPFQSAW

SEQ ID NO: 133788 - protein, 9 aa, Homo Sapiens
SATDTSAKW

SEQ ID NO: 133789 - protein, 9 aa, Homo Sapiens
SATEVDSRW

SEQ ID NO: 133790 - protein, 9 aa, Homo Sapiens
SATPSLVTW

SEQ ID NO: 133791 - protein, 9 aa, Homo Sapiens
SAVKVLMKF

SEQ ID NO: 133792 - protein, 9 aa, Homo Sapiens
SAYVDSHKW

SEQ ID NO: 133793 - protein, 9 aa, Homo Sapiens
SIDTTCTIW

SEQ ID NO: 133794 - protein, 9 aa, Homo Sapiens
SINPNNHSW

SEQ ID NO: 133795 - protein, 9 aa, Homo Sapiens
SMHFLVAEW

SEQ ID NO: 133796 - protein, 9 aa, Homo Sapiens
SSAKTILKY

SEQ ID NO: 133797 - protein, 9 aa, Homo Sapiens
SSAYEFVTW

SEQ ID NO: 133798 - protein, 9 aa, Homo Sapiens
SSCSTPLRF

SEQ ID NO: 133799 - protein, 9 aa, Homo Sapiens
SSDSHQPLW

SEQ ID NO: 133800 - protein, 9 aa, Homo Sapiens
SSDTTVKVW

SEQ ID NO: 133801 - protein, 9 aa, Homo Sapiens
SSDTTVLIW

SEQ ID NO: 133802 - protein, 9 aa, Homo Sapiens
SSGPVAESW

SEQ ID NO: 133803 - protein, 9 aa, Homo Sapiens
SSIKGAEEW

SEQ ID NO: 133804 - protein, 9 aa, Homo Sapiens
SSIVDNELW

SEQ ID NO: 133805 - protein, 9 aa, Homo Sapiens
SSLKHLYKW

SEQ ID NO: 133806 - protein, 9 aa, Homo Sapiens
SSLKKKQIW

SEQ ID NO: 133807 - protein, 9 aa, Homo Sapiens
SSLPTVEKW

SEQ ID NO: 133808 - protein, 9 aa, Homo Sapiens
SSLRVPSQW

SEQ ID NO: 133809 - protein, 9 aa, Homo Sapiens
SSMPNAESW

SEQ ID NO: 133810 - protein, 9 aa, Homo Sapiens
SSNPEQLFF

SEQ ID NO: 133811 - protein, 9 aa, Homo Sapiens
SSNVVQLIM

SEQ ID NO: 133812 - protein, 9 aa, Homo Sapiens
SSSDLMSKW

SEQ ID NO: 133813 - protein, 9 aa, Homo Sapiens
SSSDLVSKW

SEQ ID NO: 133814 - protein, 9 aa, Homo Sapiens
SSSKEHVKW

SEQ ID NO: 133815 - protein, 9 aa, Homo Sapiens
SSSQIILKW

SEQ ID NO: 133816 - protein, 9 aa, Homo Sapiens
SSSRIRAAW

SEQ ID NO: 133817 - protein, 9 aa, Homo Sapiens
SSSSIEVHW

SEQ ID NO: 133818 - protein, 9 aa, Homo Sapiens
SSSSVRVEW

SEQ ID NO: 133819 - protein, 9 aa, Homo Sapiens
SSTPHNVSW

SEQ ID NO: 133820 - protein, 9 aa, Homo Sapiens
SSTPIAPVF

SEQ ID NO: 133821 - protein, 9 aa, Homo Sapiens
SSTTVIPTL

SEQ ID NO: 133822 - protein, 9 aa, Homo Sapiens
SSVRAVAVW

SEQ ID NO: 133823 - protein, 9 aa, Homo Sapiens
SSYPNTFEW

SEQ ID NO: 133824 - protein, 9 aa, Homo Sapiens
STAKCLNIW

SEQ ID NO: 133825 - protein, 9 aa, Homo Sapiens
STAPGYYSW

SEQ ID NO: 133826 - protein, 9 aa, Homo Sapiens
STDKTVAVW

SEQ ID NO: 133827 - protein, 9 aa, Homo Sapiens
STDKTVRLW

SEQ ID NO: 133828 - protein, 9 aa, Homo Sapiens
STDRHIRLW

SEQ ID NO: 133829 - protein, 9 aa, Homo Sapiens
STIETVPYW

SEQ ID NO: 133830 - protein, 9 aa, Homo Sapiens
STNKYQLSI

SEQ ID NO: 133831 - protein, 9 aa, Homo Sapiens
SVIEEHANW

SEQ ID NO: 133832 - protein, 9 aa, Homo Sapiens
SVTEIQEKW

SEQ ID NO: 133833 - protein, 9 aa, Homo Sapiens
SVTEVQLRF

SEQ ID NO: 133834 - protein, 9 aa, Homo Sapiens
TAAETHYTY

SEQ ID NO: 133835 - protein, 9 aa, Homo Sapiens
TADITVLRW

SEQ ID NO: 133836 - protein, 9 aa, Homo Sapiens
TAHSEPSLW

SEQ ID NO: 133837 - protein, 9 aa, Homo Sapiens
TAIREVGVW

SEQ ID NO: 133838 - protein, 9 aa, Homo Sapiens
TANGIALLW

SEQ ID NO: 133839 - protein, 9 aa, Homo Sapiens
TANKYQVFF

SEQ ID NO: 133840 - protein, 9 aa, Homo Sapiens
TAVKIAPRY

SEQ ID NO: 133841 - protein, 9 aa, Homo Sapiens
TAVTPQQTW

SEQ ID NO: 133842 - protein, 9 aa, Homo Sapiens
TAVVEDVSW

SEQ ID NO: 133843 - protein, 9 aa, Homo Sapiens
TFTKIVNKW

SEQ ID NO: 133844 - protein, 9 aa, Homo Sapiens
TILVDNNTW

SEQ ID NO: 133845 - protein, 9 aa, Homo Sapiens
TINKVLLQY

SEQ ID NO: 133846 - protein, 9 aa, Homo Sapiens
TIVKVFPTW

SEQ ID NO: 133847 - protein, 9 aa, Homo Sapiens
TMSDVQIHW

SEQ ID NO: 133848 - protein, 9 aa, Homo Sapiens
TSFEQHVLW

SEQ ID NO: 133849 - protein, 9 aa, Homo Sapiens
TSLPDTDTW

SEQ ID NO: 133850 - protein, 9 aa, Homo Sapiens
TSSSLPEAW

SEQ ID NO: 133851 - protein, 9 aa, Homo Sapiens
TSTIVTLKW

SEQ ID NO: 133852 - protein, 9 aa, Homo Sapiens
TSVHPDLMK

SEQ ID NO: 133853 - protein, 9 aa, Homo Sapiens
TSVLENHHW

SEQ ID NO: 133854 - protein, 9 aa, Homo Sapiens
TSVPDHVVW

SEQ ID NO: 133855 - protein, 9 aa, Homo Sapiens
TSVPLPVTW

SEQ ID NO: 133856 - protein, 9 aa, Homo Sapiens
TSYLGKEHW

SEQ ID NO: 133857 - protein, 9 aa, Homo Sapiens
TTLVDNNTW

SEQ ID NO: 133858 - protein, 9 aa, Homo Sapiens
TTSKTDQRW

SEQ ID NO: 133859 - protein, 9 aa, Homo Sapiens
TTTVMNPKF

SEQ ID NO: 133860 - protein, 9 aa, Homo Sapiens
TVHQGDTSW

SEQ ID NO: 133861 - protein, 9 aa, Homo Sapiens
TVIEKTESW

SEQ ID NO: 133862 - protein, 9 aa, Homo Sapiens
TVLTTHHHW

SEQ ID NO: 133863 - protein, 9 aa, Homo Sapiens
TVYPKPEEW

SEQ ID NO: 133864 - protein, 9 aa, Homo Sapiens
TVYVDDASW

SEQ ID NO: 133865 - protein, 9 aa, Homo Sapiens
VAEKLNIPW

SEQ ID NO: 133866 - protein, 9 aa, Homo Sapiens
VALQDHFKW

SEQ ID NO: 133867 - protein, 9 aa, Homo Sapiens
VANLTNLVW

SEQ ID NO: 133868 - protein, 9 aa, Homo Sapiens
VAVGSGLSW

SEQ ID NO: 133869 - protein, 9 aa, Homo Sapiens
VAVTKDPNW

SEQ ID NO: 133870 - protein, 9 aa, Homo Sapiens
VFDPVTKLW

SEQ ID NO: 133871 - protein, 9 aa, Homo Sapiens
VGGEALELR

SEQ ID NO: 133872 - protein, 9 aa, Homo Sapiens
VSAAEQQLW

SEQ ID NO: 133873 - protein, 9 aa, Homo Sapiens
VSADVEERF

SEQ ID NO: 133874 - protein, 9 aa, Homo Sapiens
VSAEETEKW

SEQ ID NO: 133875 - protein, 9 aa, Homo Sapiens
VSAETVEKW

SEQ ID NO: 133876 - protein, 9 aa, Homo Sapiens
VSAGIQTSF

SEQ ID NO: 133877 - protein, 9 aa, Homo Sapiens
VSAPELGLW

SEQ ID NO: 133878 - protein, 9 aa, Homo Sapiens
VSAPEVSRW

SEQ ID NO: 133879 - protein, 9 aa, Homo Sapiens
VSAPSSETF

SEQ ID NO: 133880 - protein, 9 aa, Homo Sapiens
VSDASKPSW

SEQ ID NO: 133881 - protein, 9 aa, Homo Sapiens
VSDPENTTW

SEQ ID NO: 133882 - protein, 9 aa, Homo Sapiens
VSEHQPTTW

SEQ ID NO: 133883 - protein, 9 aa, Homo Sapiens
VSFAEKNGW

SEQ ID NO: 133884 - protein, 9 aa, Homo Sapiens
VSFDSHEEW

SEQ ID NO: 133885 - protein, 9 aa, Homo Sapiens
VSFYNQNKW

SEQ ID NO: 133886 - protein, 9 aa, Homo Sapiens
VSHPNEVSW

SEQ ID NO: 133887 - protein, 9 aa, Homo Sapiens
VSHPQSCHW

SEQ ID NO: 133888 - protein, 9 aa, Homo Sapiens
VSIEERARW

SEQ ID NO: 133889 - protein, 9 aa, Homo Sapiens
VSIRDILSW

SEQ ID NO: 133890 - protein, 9 aa, Homo Sapiens
VSKPDLITW

SEQ ID NO: 133891 - protein, 9 aa, Homo Sapiens
VSLEWLQKW

SEQ ID NO: 133892 - protein, 9 aa, Homo Sapiens
VSMIFPFHW

SEQ ID NO: 133893 - protein, 9 aa, Homo Sapiens
VSMIFPLHW

SEQ ID NO: 133894 - protein, 9 aa, Homo Sapiens
VSNGCQLLL

SEQ ID NO: 133895 - protein, 9 aa, Homo Sapiens
VSNKYGLVF

SEQ ID NO: 133896 - protein, 9 aa, Homo Sapiens
VSNPKSFEY

SEQ ID NO: 133897 - protein, 9 aa, Homo Sapiens
VSNPYHVVI

SEQ ID NO: 133898 - protein, 9 aa, Homo Sapiens
VSNRNKLKW

SEQ ID NO: 133899 - protein, 9 aa, Homo Sapiens
VSQKDEHCW

SEQ ID NO: 133900 - protein, 9 aa, Homo Sapiens
VSSDVQSVF

SEQ ID NO: 133901 - protein, 9 aa, Homo Sapiens
VSSTNGHRW

SEQ ID NO: 133902 - protein, 9 aa, Homo Sapiens
VSTRQTQSW

SEQ ID NO: 133903 - protein, 9 aa, Homo Sapiens
VSTTIDPFW

SEQ ID NO: 133904 - protein, 9 aa, Homo Sapiens
VSVDKQQQW

SEQ ID NO: 133905 - protein, 9 aa, Homo Sapiens
VSVLAGPRW

SEQ ID NO: 133906 - protein, 9 aa, Homo Sapiens
VSVPYVFRY

SEQ ID NO: 133907 - protein, 9 aa, Homo Sapiens
VTAGDPVSW

SEQ ID NO: 133908 - protein, 9 aa, Homo Sapiens
VTDNAVYHW

SEQ ID NO: 133909 - protein, 9 aa, Homo Sapiens
VTFPECVRW

SEQ ID NO: 133910 - protein, 9 aa, Homo Sapiens
VTIRLLETI

SEQ ID NO: 133911 - protein, 9 aa, Homo Sapiens
VTNKSVSVW

SEQ ID NO: 133912 - protein, 9 aa, Homo Sapiens
VTNPHSSQW

SEQ ID NO: 133913 - protein, 9 aa, Homo Sapiens
VTNPHTDAW

SEQ ID NO: 133914 - protein, 9 aa, Homo Sapiens
VTNPLQIMY

SEQ ID NO: 133915 - protein, 9 aa, Homo Sapiens
VTNPYQATI

SEQ ID NO: 133916 - protein, 9 aa, Homo Sapiens
VTQRLNSQW

SEQ ID NO: 133917 - protein, 9 aa, Homo Sapiens
VTSKVIFFW

SEQ ID NO: 133918 - protein, 9 aa, Homo Sapiens
VTSPLTVEW

SEQ ID NO: 133919 - protein, 9 aa, Homo Sapiens
VTTVVNPKY

SEQ ID NO: 133920 - protein, 9 aa, Homo Sapiens
VTYKNVPNW

SEQ ID NO: 133921 - protein, 9 aa, Homo Sapiens
VVDERQYIW

SEQ ID NO: 133922 - protein, 9 aa, Homo Sapiens
VVMPIAHEF

SEQ ID NO: 133923 - protein, 9 aa, Homo Sapiens
VVSSIHSSW

SEQ ID NO: 133924 - protein, 9 aa, Homo Sapiens
VVVRDTAAW

SEQ ID NO: 133925 - protein, 9 aa, Homo Sapiens
WSTKESPRW

SEQ ID NO: 133926 - protein, 9 aa, Homo Sapiens
YAAKVENKW

SEQ ID NO: 133927 - protein, 9 aa, Homo Sapiens
YAGPEVDIW

SEQ ID NO: 133928 - protein, 9 aa, Homo Sapiens
YLFKGNNRW

SEQ ID NO: 133929 - protein, 9 aa, Homo Sapiens
YLNRHLHTW

SEQ ID NO: 133930 - protein, 9 aa, Homo Sapiens
YSIRGQLSW

SEQ ID NO: 133931 - protein, 9 aa, Homo Sapiens
YSLKKRHFF

SEQ ID NO: 133932 - protein, 9 aa, Homo Sapiens
YSLMSSEKW

SEQ ID NO: 133933 - protein, 9 aa, Homo Sapiens
YSLPEFEEW

SEQ ID NO: 133934 - protein, 9 aa, Homo Sapiens
YSNAKVSCW

SEQ ID NO: 133935 - protein, 9 aa, Homo Sapiens
YSNEVVTLW

SEQ ID NO: 133936 - protein, 9 aa, Homo Sapiens
YSVRVSPQM

SEQ ID NO: 133937 - protein, 9 aa, Homo Sapiens
YTIKDTVAW

SEQ ID NO: 133938 - protein, 9 aa, Homo Sapiens
YTNKVITLW

SEQ ID NO: 133939 - protein, 9 aa, Homo Sapiens
YTNRVVTLW

SEQ ID NO: 133940 - protein, 9 aa, Homo Sapiens
YTVGAPHTW

SEQ ID NO: 133941 - protein, 9 aa, Homo Sapiens
YTVRVIDVF

SEQ ID NO: 133942 - protein, 9 aa, Homo Sapiens
YTYKKQVKI

SEQ ID NO: 133943 - protein, 10 aa, Homo Sapiens
AAGHAELAWT

SEQ ID NO: 133944 - protein, 10 aa, Homo Sapiens
AALPDQSFLW

SEQ ID NO: 133945 - protein, 10 aa, Homo Sapiens
AHSNLNGVWH

SEQ ID NO: 133946 - protein, 10 aa, Homo Sapiens
ALAPILDDGW

SEQ ID NO: 133947 - protein, 10 aa, Homo Sapiens
ASARGSGATW

SEQ ID NO: 133948 - protein, 10 aa, Homo Sapiens
ASFNDNIIKW

SEQ ID NO: 133949 - protein, 10 aa, Homo Sapiens
ASFSDYYYKW

SEQ ID NO: 133950 - protein, 10 aa, Homo Sapiens
ASINPLNDHW

SEQ ID NO: 133951 - protein, 10 aa, Homo Sapiens
ASLQEIGDRW

SEQ ID NO: 133952 - protein, 10 aa, Homo Sapiens
ASVTEIQEKW

SEQ ID NO: 133953 - protein, 10 aa, Homo Sapiens
ASYDGTAQVW

SEQ ID NO: 133954 - protein, 10 aa, Homo Sapiens
ASYQDRRQSW

SEQ ID NO: 133955 - protein, 10 aa, Homo Sapiens
ATCGQQVDIW

SEQ ID NO: 133956 - protein, 10 aa, Homo Sapiens
ATILGNTERW

SEQ ID NO: 133957 - protein, 10 aa, Homo Sapiens
ATVKDDLTKW

SEQ ID NO: 133958 - protein, 10 aa, Homo Sapiens
ATVKYLSEKW

SEQ ID NO: 133959 - protein, 10 aa, Homo Sapiens
AVNPRDPPSW

SEQ ID NO: 133960 - protein, 10 aa, Homo Sapiens
CLGVLPTVCW

SEQ ID NO: 133961 - protein, 10 aa, Homo Sapiens
DLSTLQEKMA

SEQ ID NO: 133962 - protein, 10 aa, Homo Sapiens
DTNADKQLSF

SEQ ID NO: 133963 - protein, 10 aa, Homo Sapiens
ENLRILSSPW

SEQ ID NO: 133964 - protein, 10 aa, Homo Sapiens
ESLRSHFEQW

SEQ ID NO: 133965 - protein, 10 aa, Homo Sapiens
FSGEELDKLW

SEQ ID NO: 133966 - protein, 10 aa, Homo Sapiens
FSLKESIMKW

SEQ ID NO: 133967 - protein, 10 aa, Homo Sapiens
FSLQAPAPLM

SEQ ID NO: 133968 - protein, 10 aa, Homo Sapiens
FTLREVQERW

SEQ ID NO: 133969 - protein, 10 aa, Homo Sapiens
GAYKYIQELW

SEQ ID NO: 133970 - protein, 10 aa, Homo Sapiens
GPPPPPGKPQ

SEQ ID NO: 133971 - protein, 10 aa, Homo Sapiens
GSFHGSPYEW

SEQ ID NO: 133972 - protein, 10 aa, Homo Sapiens
GSHRWQGETW

SEQ ID NO: 133973 - protein, 10 aa, Homo Sapiens
GSIPEDHEDW

SEQ ID NO: 133974 - protein, 10 aa, Homo Sapiens
HACALAASLW

SEQ ID NO: 133975 - protein, 10 aa, Homo Sapiens
HAFDGFEVNW

SEQ ID NO: 133976 - protein, 10 aa, Homo Sapiens
HIWPDDITKW

SEQ ID NO: 133977 - protein, 10 aa, Homo Sapiens
HLNPIILPLW

SEQ ID NO: 133978 - protein, 10 aa, Homo Sapiens
HSAHTKLQTW

SEQ ID NO: 133979 - protein, 10 aa, Homo Sapiens
HSAVVEDVAW

SEQ ID NO: 133980 - protein, 10 aa, Homo Sapiens
HSCEVKGIEW

SEQ ID NO: 133981 - protein, 10 aa, Homo Sapiens
HSCPESVKKW

SEQ ID NO: 133982 - protein, 10 aa, Homo Sapiens
HSDMIYNVSW

SEQ ID NO: 133983 - protein, 10 aa, Homo Sapiens
HSDNPSQLIW

SEQ ID NO: 133984 - protein, 10 aa, Homo Sapiens
HSFSGSQQKW

SEQ ID NO: 133985 - protein, 10 aa, Homo Sapiens
HSGPGLLQLW

SEQ ID NO: 133986 - protein, 10 aa, Homo Sapiens
HSGPVVAMVW

SEQ ID NO: 133987 - protein, 10 aa, Homo Sapiens
HSITSDNHKW

SEQ ID NO: 133988 - protein, 10 aa, Homo Sapiens
HSMDPPTFTF

SEQ ID NO: 133989 - protein, 10 aa, Homo Sapiens
HSMLDINALF

SEQ ID NO: 133990 - protein, 10 aa, Homo Sapiens
HSMSDPGVSY

SEQ ID NO: 133991 - protein, 10 aa, Homo Sapiens
HSNPGDPALW

SEQ ID NO: 133992 - protein, 10 aa, Homo Sapiens
HSQEVTSVCW

SEQ ID NO: 133993 - protein, 10 aa, Homo Sapiens
HSVAQAGVQW

SEQ ID NO: 133994 - protein, 10 aa, Homo Sapiens
HSVTQAGVQW

SEQ ID NO: 133995 - protein, 10 aa, Homo Sapiens
HTAKISDFSW

SEQ ID NO: 133996 - protein, 10 aa, Homo Sapiens
HTAPPENKTW

SEQ ID NO: 133997 - protein, 10 aa, Homo Sapiens
HTAPVLDIAW

SEQ ID NO: 133998 - protein, 10 aa, Homo Sapiens
HTAVVEDVSW

SEQ ID NO: 133999 - protein, 10 aa, Homo Sapiens
HTDGPLASSW

SEQ ID NO: 134000 - protein, 10 aa, Homo Sapiens
HTFPNATDYW

SEQ ID NO: 134001 - protein, 10 aa, Homo Sapiens
HTGPVLDVCW

SEQ ID NO: 134002 - protein, 10 aa, Homo Sapiens
HTIGCNAVSW

SEQ ID NO: 134003 - protein, 10 aa, Homo Sapiens
HTLDDRTQLW

SEQ ID NO: 134004 - protein, 10 aa, Homo Sapiens
HTMTDDVTFW

SEQ ID NO: 134005 - protein, 10 aa, Homo Sapiens
HTNEVNAIKW

SEQ ID NO: 134006 - protein, 10 aa, Homo Sapiens
HVAPVTSVEW

SEQ ID NO: 134007 - protein, 10 aa, Homo Sapiens
HVNPYIGLFF

SEQ ID NO: 134008 - protein, 10 aa, Homo Sapiens
HVNRNGDVHW

SEQ ID NO: 134009 - protein, 10 aa, Homo Sapiens
IAANEENRKW

SEQ ID NO: 134010 - protein, 10 aa, Homo Sapiens
IIWREENGTW

SEQ ID NO: 134011 - protein, 10 aa, Homo Sapiens
ISAPDSQVRF

SEQ ID NO: 134012 - protein, 10 aa, Homo Sapiens
ISASSLTSKW

SEQ ID NO: 134013 - protein, 10 aa, Homo Sapiens
ISATEVDSRW

SEQ ID NO: 134014 - protein, 10 aa, Homo Sapiens
ISDPDVRHTW

SEQ ID NO: 134015 - protein, 10 aa, Homo Sapiens
ISEHESNLVW

SEQ ID NO: 134016 - protein, 10 aa, Homo Sapiens
ISEKQHEVYW

SEQ ID NO: 134017 - protein, 10 aa, Homo Sapiens
ISFHNIHNTF

SEQ ID NO: 134018 - protein, 10 aa, Homo Sapiens
ISFYEERLTW

SEQ ID NO: 134019 - protein, 10 aa, Homo Sapiens
ISIRTSSQTF

SEQ ID NO: 134020 - protein, 10 aa, Homo Sapiens
ISLSEPRMLW

SEQ ID NO: 134021 - protein, 10 aa, Homo Sapiens
ISMPDFDLHL

SEQ ID NO: 134022 - protein, 10 aa, Homo Sapiens
ISNPEHLTEW

SEQ ID NO: 134023 - protein, 10 aa, Homo Sapiens
ISQPASGNTF

SEQ ID NO: 134024 - protein, 10 aa, Homo Sapiens
ISSSDLVSKW

SEQ ID NO: 134025 - protein, 10 aa, Homo Sapiens
ISTDGKICSW

SEQ ID NO: 134026 - protein, 10 aa, Homo Sapiens
ISVPGLQTNW

SEQ ID NO: 134027 - protein, 10 aa, Homo Sapiens
ISVRANTENW

SEQ ID NO: 134028 - protein, 10 aa, Homo Sapiens
ISYSEHDSLW

SEQ ID NO: 134029 - protein, 10 aa, Homo Sapiens
ISYSGHDSFW

SEQ ID NO: 134030 - protein, 10 aa, Homo Sapiens
ITFPNKEIAW

SEQ ID NO: 134031 - protein, 10 aa, Homo Sapiens
ITKADAAEFW

SEQ ID NO: 134032 - protein, 10 aa, Homo Sapiens
ITLPTEASTW

SEQ ID NO: 134033 - protein, 10 aa, Homo Sapiens
ITVDGKPPTW

SEQ ID NO: 134034 - protein, 10 aa, Homo Sapiens
IVPRLLFEDW

SEQ ID NO: 134035 - protein, 10 aa, Homo Sapiens
KAATIGQIGW

SEQ ID NO: 134036 - protein, 10 aa, Homo Sapiens
KAFDEKKQKW

SEQ ID NO: 134037 - protein, 10 aa, Homo Sapiens
KAIADRGWRF

SEQ ID NO: 134038 - protein, 10 aa, Homo Sapiens
KAIPDTRLTI

SEQ ID NO: 134039 - protein, 10 aa, Homo Sapiens
KAISSIHSLW

SEQ ID NO: 134040 - protein, 10 aa, Homo Sapiens
KALNHLREIW

SEQ ID NO: 134041 - protein, 10 aa, Homo Sapiens
KANPHNYDAW

SEQ ID NO: 134042 - protein, 10 aa, Homo Sapiens
KANPVNCVFF

SEQ ID NO: 134043 - protein, 10 aa, Homo Sapiens
KAVDIVKQVW

SEQ ID NO: 134044 - protein, 10 aa, Homo Sapiens
KAVIDLNNRW

SEQ ID NO: 134045 - protein, 10 aa, Homo Sapiens
KAVKTGSICW

SEQ ID NO: 134046 - protein, 10 aa, Homo Sapiens
KAVQEGNIQW

SEQ ID NO: 134047 - protein, 10 aa, Homo Sapiens
KAWAEYVVEW

SEQ ID NO: 134048 - protein, 10 aa, Homo Sapiens
KAWRGTLARW

SEQ ID NO: 134049 - protein, 10 aa, Homo Sapiens
KAYDRVEQEW

SEQ ID NO: 134050 - protein, 10 aa, Homo Sapiens
KAYSVQGDKW

SEQ ID NO: 134051 - protein, 10 aa, Homo Sapiens
KFIDPIYQVW

SEQ ID NO: 134052 - protein, 10 aa, Homo Sapiens
KGFGKEHAKW

SEQ ID NO: 134053 - protein, 10 aa, Homo Sapiens
KGFSDEDNTW

SEQ ID NO: 134054 - protein, 10 aa, Homo Sapiens
KGFSEEHNTW

SEQ ID NO: 134055 - protein, 10 aa, Homo Sapiens
KGFTDADNTW

SEQ ID NO: 134056 - protein, 10 aa, Homo Sapiens
KIDPSTLQMW

SEQ ID NO: 134057 - protein, 10 aa, Homo Sapiens
KIEKEIQQKW

SEQ ID NO: 134058 - protein, 10 aa, Homo Sapiens
KIIEDLGVHF

SEQ ID NO: 134059 - protein, 10 aa, Homo Sapiens
KLIDVTNIYW

SEQ ID NO: 134060 - protein, 10 aa, Homo Sapiens
KLLDLKEPTW

SEQ ID NO: 134061 - protein, 10 aa, Homo Sapiens
KLLEGLKLMA

SEQ ID NO: 134062 - protein, 10 aa, Homo Sapiens
KLLPGIEVLW

SEQ ID NO: 134063 - protein, 10 aa, Homo Sapiens
KLMPGRIQLW

SEQ ID NO: 134064 - protein, 10 aa, Homo Sapiens
KLPVHTEISW

SEQ ID NO: 134065 - protein, 10 aa, Homo Sapiens
KLTSTQVKIW

SEQ ID NO: 134066 - protein, 10 aa, Homo Sapiens
KLYPGNQVLW

SEQ ID NO: 134067 - protein, 10 aa, Homo Sapiens
KMAPPDLPHW

SEQ ID NO: 134068 - protein, 10 aa, Homo Sapiens
KMVSDINNGW

SEQ ID NO: 134069 - protein, 10 aa, Homo Sapiens
KQMPDVNVSW

SEQ ID NO: 134070 - protein, 10 aa, Homo Sapiens
KSAEKEISLW

SEQ ID NO: 134071 - protein, 10 aa, Homo Sapiens
KSAKDALLLW

SEQ ID NO: 134072 - protein, 10 aa, Homo Sapiens
KSAPELKTGI

SEQ ID NO: 134073 - protein, 10 aa, Homo Sapiens
KSAPSDSLTY

SEQ ID NO: 134074 - protein, 10 aa, Homo Sapiens
KSATDTSAKW

SEQ ID NO: 134075 - protein, 10 aa, Homo Sapiens
KSCSKLFQRW

SEQ ID NO: 134076 - protein, 10 aa, Homo Sapiens
KSEALKDRHW

SEQ ID NO: 134077 - protein, 10 aa, Homo Sapiens
KSENAGAQGW

SEQ ID NO: 134078 - protein, 10 aa, Homo Sapiens
KSFEGNVFMY

SEQ ID NO: 134079 - protein, 10 aa, Homo Sapiens
KSFEKAKESW

SEQ ID NO: 134080 - protein, 10 aa, Homo Sapiens
KSFPHPIDKW

SEQ ID NO: 134081 - protein, 10 aa, Homo Sapiens
KSFSESGINY

SEQ ID NO: 134082 - protein, 10 aa, Homo Sapiens
KSGPVVSLGW

SEQ ID NO: 134083 - protein, 10 aa, Homo Sapiens
KSHPFTNPRW

SEQ ID NO: 134084 - protein, 10 aa, Homo Sapiens
KSHYDEAYKW

SEQ ID NO: 134085 - protein, 10 aa, Homo Sapiens
KSIDELNSAW

SEQ ID NO: 134086 - protein, 10 aa, Homo Sapiens
KSIDEMNNAW

SEQ ID NO: 134087 - protein, 10 aa, Homo Sapiens
KSIEFLSSKW

SEQ ID NO: 134088 - protein, 10 aa, Homo Sapiens
KSIGDIFLKY

SEQ ID NO: 134089 - protein, 10 aa, Homo Sapiens
KSITEINANF

SEQ ID NO: 134090 - protein, 10 aa, Homo Sapiens
KSITIIGGGF

SEQ ID NO: 134091 - protein, 10 aa, Homo Sapiens
KSKGSQTEEW

SEQ ID NO: 134092 - protein, 10 aa, Homo Sapiens
KSLDLLTMKN

SEQ ID NO: 134093 - protein, 10 aa, Homo Sapiens
KSLFDRKHYF

SEQ ID NO: 134094 - protein, 10 aa, Homo Sapiens
KSLIEEGGDW

SEQ ID NO: 134095 - protein, 10 aa, Homo Sapiens
KSLIIVHPSW

SEQ ID NO: 134096 - protein, 10 aa, Homo Sapiens
KSLNIFGSSW

SEQ ID NO: 134097 - protein, 10 aa, Homo Sapiens
KSLPAEINRM

SEQ ID NO: 134098 - protein, 10 aa, Homo Sapiens
KSLPASLSFL

SEQ ID NO: 134099 - protein, 10 aa, Homo Sapiens
KSLPVSVPVW

SEQ ID NO: 134100 - protein, 10 aa, Homo Sapiens
KSLSAERERW

SEQ ID NO: 134101 - protein, 10 aa, Homo Sapiens
KSLSLNPFLW

SEQ ID NO: 134102 - protein, 10 aa, Homo Sapiens
KSLTEEAENW

SEQ ID NO: 134103 - protein, 10 aa, Homo Sapiens
KSLYAIFSQF

SEQ ID NO: 134104 - protein, 10 aa, Homo Sapiens
KSMYGVYNTF

SEQ ID NO: 134105 - protein, 10 aa, Homo Sapiens
KSNEDLHKLW

SEQ ID NO: 134106 - protein, 10 aa, Homo Sapiens
KSNQTDAIKW

SEQ ID NO: 134107 - protein, 10 aa, Homo Sapiens
KSSIAGSSTW

SEQ ID NO: 134108 - protein, 10 aa, Homo Sapiens
KSTPYTAVRW

SEQ ID NO: 134109 - protein, 10 aa, Homo Sapiens
KSVDDHIVRF

SEQ ID NO: 134110 - protein, 10 aa, Homo Sapiens
KSVENLGVSY

SEQ ID NO: 134111 - protein, 10 aa, Homo Sapiens
KSVFVKNVGW

SEQ ID NO: 134112 - protein, 10 aa, Homo Sapiens
KSVIDYQTHF

SEQ ID NO: 134113 - protein, 10 aa, Homo Sapiens
KSVQNSITQW

SEQ ID NO: 134114 - protein, 10 aa, Homo Sapiens
KSVSFSDVFF

SEQ ID NO: 134115 - protein, 10 aa, Homo Sapiens
KSVTADTEMW

SEQ ID NO: 134116 - protein, 10 aa, Homo Sapiens
KTAEEIKQIW

SEQ ID NO: 134117 - protein, 10 aa, Homo Sapiens
KTEASETRKW

SEQ ID NO: 134118 - protein, 10 aa, Homo Sapiens
KTENVMVTSW

SEQ ID NO: 134119 - protein, 10 aa, Homo Sapiens
KTFPHPIDKW

SEQ ID NO: 134120 - protein, 10 aa, Homo Sapiens
KTHLMSEEEW

SEQ ID NO: 134121 - protein, 10 aa, Homo Sapiens
KTHPYNPLWA

SEQ ID NO: 134122 - protein, 10 aa, Homo Sapiens
KTIDICHDHF

SEQ ID NO: 134123 - protein, 10 aa, Homo Sapiens
KTIEGIYEKF

SEQ ID NO: 134124 - protein, 10 aa, Homo Sapiens
KTIGGGDDSF

SEQ ID NO: 134125 - protein, 10 aa, Homo Sapiens
KTLAEINQKW

SEQ ID NO: 134126 - protein, 10 aa, Homo Sapiens
KTLEDNSEKW

SEQ ID NO: 134127 - protein, 10 aa, Homo Sapiens
KTLHDTRTHF

SEQ ID NO: 134128 - protein, 10 aa, Homo Sapiens
KTLPADVQNY

SEQ ID NO: 134129 - protein, 10 aa, Homo Sapiens
KTLPFYKDYF

SEQ ID NO: 134130 - protein, 10 aa, Homo Sapiens
KTLSDIFLLF

SEQ ID NO: 134131 - protein, 10 aa, Homo Sapiens
KTLSTFKESW

SEQ ID NO: 134132 - protein, 10 aa, Homo Sapiens
KTLTDISNQW

SEQ ID NO: 134133 - protein, 10 aa, Homo Sapiens
KTMDPSCLKW

SEQ ID NO: 134134 - protein, 10 aa, Homo Sapiens
KTNIQKEATW

SEQ ID NO: 134135 - protein, 10 aa, Homo Sapiens
KTNTFQGVIF

SEQ ID NO: 134136 - protein, 10 aa, Homo Sapiens
KTPEKEPPLW

SEQ ID NO: 134137 - protein, 10 aa, Homo Sapiens
KTPVDGQYVW

SEQ ID NO: 134138 - protein, 10 aa, Homo Sapiens
KTQGGHVYMW

SEQ ID NO: 134139 - protein, 10 aa, Homo Sapiens
KTSDSTFLVF

SEQ ID NO: 134140 - protein, 10 aa, Homo Sapiens
KTVAGGAWTY

SEQ ID NO: 134141 - protein, 10 aa, Homo Sapiens
KTVIDSQTHY

SEQ ID NO: 134142 - protein, 10 aa, Homo Sapiens
KTYGEIFEKF

SEQ ID NO: 134143 - protein, 10 aa, Homo Sapiens
KVFESWMHHW

SEQ ID NO: 134144 - protein, 10 aa, Homo Sapiens
KVHPVIPAMW

SEQ ID NO: 134145 - protein, 10 aa, Homo Sapiens
KVIAEDEVLW

SEQ ID NO: 134146 - protein, 10 aa, Homo Sapiens
KVLEEHGEWW

SEQ ID NO: 134147 - protein, 10 aa, Homo Sapiens
KVLIDIREYW

SEQ ID NO: 134148 - protein, 10 aa, Homo Sapiens
KVLPPLEQVW

SEQ ID NO: 134149 - protein, 10 aa, Homo Sapiens
KVMPYVDILF

SEQ ID NO: 134150 - protein, 10 aa, Homo Sapiens
KVQDFQGNLW

SEQ ID NO: 134151 - protein, 10 aa, Homo Sapiens
LAADGKSTTW

SEQ ID NO: 134152 - protein, 10 aa, Homo Sapiens
LACGVAKVLW

SEQ ID NO: 134153 - protein, 10 aa, Homo Sapiens
LALPPGAEHW

SEQ ID NO: 134154 - protein, 10 aa, Homo Sapiens
LAVGDNNSKW

SEQ ID NO: 134155 - protein, 10 aa, Homo Sapiens
LEVDNKEALW

SEQ ID NO: 134156 - protein, 10 aa, Homo Sapiens
LSAHGIVVAW

SEQ ID NO: 134157 - protein, 10 aa, Homo Sapiens
LSALCLLGAW

SEQ ID NO: 134158 - protein, 10 aa, Homo Sapiens
LSALDKGSTH

SEQ ID NO: 134159 - protein, 10 aa, Homo Sapiens
LSARDFGERW

SEQ ID NO: 134160 - protein, 10 aa, Homo Sapiens
LSFIRDEVTW

SEQ ID NO: 134161 - protein, 10 aa, Homo Sapiens
LSIPDIKTAF

SEQ ID NO: 134162 - protein, 10 aa, Homo Sapiens
LSLPADLTKM

SEQ ID NO: 134163 - protein, 10 aa, Homo Sapiens
LSLPDIKVYL

SEQ ID NO: 134164 - protein, 10 aa, Homo Sapiens
LSLRDITSSW

SEQ ID NO: 134165 - protein, 10 aa, Homo Sapiens
LSMPASLGRM

SEQ ID NO: 134166 - protein, 10 aa, Homo Sapiens
LSNAKDVAHW

SEQ ID NO: 134167 - protein, 10 aa, Homo Sapiens
LSSPDDAVIW

SEQ ID NO: 134168 - protein, 10 aa, Homo Sapiens
LSSPDYQIRW

SEQ ID NO: 134169 - protein, 10 aa, Homo Sapiens
LSSRGSCDSL

SEQ ID NO: 134170 - protein, 10 aa, Homo Sapiens
LSTHDPNITW

SEQ ID NO: 134171 - protein, 10 aa, Homo Sapiens
LSTPEGKWQW

SEQ ID NO: 134172 - protein, 10 aa, Homo Sapiens
LSTSIPEAQW

SEQ ID NO: 134173 - protein, 10 aa, Homo Sapiens
LSVKEPQLVW

SEQ ID NO: 134174 - protein, 10 aa, Homo Sapiens
LSVKGTLQQF

SEQ ID NO: 134175 - protein, 10 aa, Homo Sapiens
LSVQPYSQEW

SEQ ID NO: 134176 - protein, 10 aa, Homo Sapiens
LTIATGTGNW

SEQ ID NO: 134177 - protein, 10 aa, Homo Sapiens
LTMSDVQIHW

SEQ ID NO: 134178 - protein, 10 aa, Homo Sapiens
LTNKGELFVW

SEQ ID NO: 134179 - protein, 10 aa, Homo Sapiens
LTWPEGKVLW

SEQ ID NO: 134180 - protein, 10 aa, Homo Sapiens
LVAEVPKEHW

SEQ ID NO: 134181 - protein, 10 aa, Homo Sapiens
MAFQNDVYEW

SEQ ID NO: 134182 - protein, 10 aa, Homo Sapiens
MSESELGRKW

SEQ ID NO: 134183 - protein, 10 aa, Homo Sapiens
MTTRELQQYW

SEQ ID NO: 134184 - protein, 10 aa, Homo Sapiens
NSGPVVAMVW

SEQ ID NO: 134185 - protein, 10 aa, Homo Sapiens
NSIKELNERW

SEQ ID NO: 134186 - protein, 10 aa, Homo Sapiens
PAASSFGSPG

SEQ ID NO: 134187 - protein, 10 aa, Homo Sapiens
QMEKIVRITW

SEQ ID NO: 134188 - protein, 10 aa, Homo Sapiens
QSITSGKHYW

SEQ ID NO: 134189 - protein, 10 aa, Homo Sapiens
QSLKDSEQKW

SEQ ID NO: 134190 - protein, 10 aa, Homo Sapiens
QSLKELLQNW

SEQ ID NO: 134191 - protein, 10 aa, Homo Sapiens
QSLPDFGISY

SEQ ID NO: 134192 - protein, 10 aa, Homo Sapiens
QSVALLEQKW

SEQ ID NO: 134193 - protein, 10 aa, Homo Sapiens
QTVKDSRTVY

SEQ ID NO: 134194 - protein, 10 aa, Homo Sapiens
RAAADGSLQW

SEQ ID NO: 134195 - protein, 10 aa, Homo Sapiens
RAADCEVEQW

SEQ ID NO: 134196 - protein, 10 aa, Homo Sapiens
RAAEPVRVVW

SEQ ID NO: 134197 - protein, 10 aa, Homo Sapiens
RAAPDPPPLF

SEQ ID NO: 134198 - protein, 10 aa, Homo Sapiens
RAFEDVKVFW

SEQ ID NO: 134199 - protein, 10 aa, Homo Sapiens
RAIDSIHQLW

SEQ ID NO: 134200 - protein, 10 aa, Homo Sapiens
RAIDTDSNLW

SEQ ID NO: 134201 - protein, 10 aa, Homo Sapiens
RAIEALLQYW

SEQ ID NO: 134202 - protein, 10 aa, Homo Sapiens
RAIKQLDYEW

SEQ ID NO: 134203 - protein, 10 aa, Homo Sapiens
RAMQDMQLLW

SEQ ID NO: 134204 - protein, 10 aa, Homo Sapiens
RAVDDGVNTF

SEQ ID NO: 134205 - protein, 10 aa, Homo Sapiens
RAVGHEPEHW

SEQ ID NO: 134206 - protein, 10 aa, Homo Sapiens
RGIDIPEVNW

SEQ ID NO: 134207 - protein, 10 aa, Homo Sapiens
RGVGDIKILW

SEQ ID NO: 134208 - protein, 10 aa, Homo Sapiens
RGYPDSESTW

SEQ ID NO: 134209 - protein, 10 aa, Homo Sapiens
RIESVIKELW

SEQ ID NO: 134210 - protein, 10 aa, Homo Sapiens
RIFEDYTVSW

SEQ ID NO: 134211 - protein, 10 aa, Homo Sapiens
RILDLIDDAW

SEQ ID NO: 134212 - protein, 10 aa, Homo Sapiens
RILGSDTESW

SEQ ID NO: 134213 - protein, 10 aa, Homo Sapiens
RLIPQPAFQW

SEQ ID NO: 134214 - protein, 10 aa, Homo Sapiens
RMISLIESGW

SEQ ID NO: 134215 - protein, 10 aa, Homo Sapiens
RMLGQCTQTW

SEQ ID NO: 134216 - protein, 10 aa, Homo Sapiens
RMLSFQQMTW

SEQ ID NO: 134217 - protein, 10 aa, Homo Sapiens
RMYPLKPTWW

SEQ ID NO: 134218 - protein, 10 aa, Homo Sapiens
RSADEPMTTF

SEQ ID NO: 134219 - protein, 10 aa, Homo Sapiens
RSAPPGPFAW

SEQ ID NO: 134220 - protein, 10 aa, Homo Sapiens
RSAPSEGDEW

SEQ ID NO: 134221 - protein, 10 aa, Homo Sapiens
RSARDTAQIF

SEQ ID NO: 134222 - protein, 10 aa, Homo Sapiens
RSATCAQVNW

SEQ ID NO: 134223 - protein, 10 aa, Homo Sapiens
RSCDAKVDVW

SEQ ID NO: 134224 - protein, 10 aa, Homo Sapiens
RSCTVEAVRW

SEQ ID NO: 134225 - protein, 10 aa, Homo Sapiens
RSESHMEWTW

SEQ ID NO: 134226 - protein, 10 aa, Homo Sapiens
RSFCDLTDEW

SEQ ID NO: 134227 - protein, 10 aa, Homo Sapiens
RSFKETTNRW

SEQ ID NO: 134228 - protein, 10 aa, Homo Sapiens
RSGPAGTCRW

SEQ ID NO: 134229 - protein, 10 aa, Homo Sapiens
RSGQNGNQTW

SEQ ID NO: 134230 - protein, 10 aa, Homo Sapiens
RSIEEVYYLW

SEQ ID NO: 134231 - protein, 10 aa, Homo Sapiens
RSIKEKISMW

SEQ ID NO: 134232 - protein, 10 aa, Homo Sapiens
RSIPAITRYW

SEQ ID NO: 134233 - protein, 10 aa, Homo Sapiens
RSIQADGLVW

SEQ ID NO: 134234 - protein, 10 aa, Homo Sapiens
RSIQLDGLVW

SEQ ID NO: 134235 - protein, 10 aa, Homo Sapiens
RSLKDALFKW

SEQ ID NO: 134236 - protein, 10 aa, Homo Sapiens
RSLKDHKVSF

SEQ ID NO: 134237 - protein, 10 aa, Homo Sapiens
RSLNQTGVQW

SEQ ID NO: 134238 - protein, 10 aa, Homo Sapiens
RSLPEPLMTY

SEQ ID NO: 134239 - protein, 10 aa, Homo Sapiens
RSLPIVFDEF

SEQ ID NO: 134240 - protein, 10 aa, Homo Sapiens
RSLPRDTSNW

SEQ ID NO: 134241 - protein, 10 aa, Homo Sapiens
RSLTTLSEQW

SEQ ID NO: 134242 - protein, 10 aa, Homo Sapiens
RSLVPAAVVW

SEQ ID NO: 134243 - protein, 10 aa, Homo Sapiens
RSLWGPYAGW

SEQ ID NO: 134244 - protein, 10 aa, Homo Sapiens
RSMQLDYTTW

SEQ ID NO: 134245 - protein, 10 aa, Homo Sapiens
RSNGSYVDGW

SEQ ID NO: 134246 - protein, 10 aa, Homo Sapiens
RSQSSELTKW

SEQ ID NO: 134247 - protein, 10 aa, Homo Sapiens
RSRDISREEW

SEQ ID NO: 134248 - protein, 10 aa, Homo Sapiens
RSRVDQEERW

SEQ ID NO: 134249 - protein, 10 aa, Homo Sapiens
RSSQTGDWTW

SEQ ID NO: 134250 - protein, 10 aa, Homo Sapiens
RSSSLSDFSW

SEQ ID NO: 134251 - protein, 10 aa, Homo Sapiens
RSTHEAVARW

SEQ ID NO: 134252 - protein, 10 aa, Homo Sapiens
RSVAQAGVQW

SEQ ID NO: 134253 - protein, 10 aa, Homo Sapiens
RSVDVTNTTF

SEQ ID NO: 134254 - protein, 10 aa, Homo Sapiens
RSVEDLKERY

SEQ ID NO: 134255 - protein, 10 aa, Homo Sapiens
RSVEEPREFW

SEQ ID NO: 134256 - protein, 10 aa, Homo Sapiens
RSVLDNRARF

SEQ ID NO: 134257 - protein, 10 aa, Homo Sapiens
RSVNIKEICW

SEQ ID NO: 134258 - protein, 10 aa, Homo Sapiens
RSVPTNKVCF

SEQ ID NO: 134259 - protein, 10 aa, Homo Sapiens
RSVPTSTVFY

SEQ ID NO: 134260 - protein, 10 aa, Homo Sapiens
RSVQVIGGIW

SEQ ID NO: 134261 - protein, 10 aa, Homo Sapiens
RSVTQAGVQW

SEQ ID NO: 134262 - protein, 10 aa, Homo Sapiens
RSYQLEGVNW

SEQ ID NO: 134263 - protein, 10 aa, Homo Sapiens
RSYSESEKQW

SEQ ID NO: 134264 - protein, 10 aa, Homo Sapiens
RTAKALQAHW

SEQ ID NO: 134265 - protein, 10 aa, Homo Sapiens
RTAPFHLDLW

SEQ ID NO: 134266 - protein, 10 aa, Homo Sapiens
RTAQLAKIKW

SEQ ID NO: 134267 - protein, 10 aa, Homo Sapiens
RTCEWTGLKF

SEQ ID NO: 134268 - protein, 10 aa, Homo Sapiens
RTCQVKTGTW

SEQ ID NO: 134269 - protein, 10 aa, Homo Sapiens
RTEAILKASW

SEQ ID NO: 134270 - protein, 10 aa, Homo Sapiens
RTEEMKWRQW

SEQ ID NO: 134271 - protein, 10 aa, Homo Sapiens
RTFTDHVMLF

SEQ ID NO: 134272 - protein, 10 aa, Homo Sapiens
RTILVDNNTW

SEQ ID NO: 134273 - protein, 10 aa, Homo Sapiens
RTIQELFEVY

SEQ ID NO: 134274 - protein, 10 aa, Homo Sapiens
RTLLESCVKW

SEQ ID NO: 134275 - protein, 10 aa, Homo Sapiens
RTLPTKEFLW

SEQ ID NO: 134276 - protein, 10 aa, Homo Sapiens
RTMELLTQNW

SEQ ID NO: 134277 - protein, 10 aa, Homo Sapiens
RTMNIKSATW

SEQ ID NO: 134278 - protein, 10 aa, Homo Sapiens
RTNPICSMTW

SEQ ID NO: 134279 - protein, 10 aa, Homo Sapiens
RTTHLHNDLW

SEQ ID NO: 134280 - protein, 10 aa, Homo Sapiens
RTTLVDNNTW

SEQ ID NO: 134281 - protein, 10 aa, Homo Sapiens
RTVPGALGAW

SEQ ID NO: 134282 - protein, 10 aa, Homo Sapiens
RVDPDVAQHW

SEQ ID NO: 134283 - protein, 10 aa, Homo Sapiens
RVENVKGAVW

SEQ ID NO: 134284 - protein, 10 aa, Homo Sapiens
RVFPDKGYSF

SEQ ID NO: 134285 - protein, 10 aa, Homo Sapiens
RVFPEKGYSF

SEQ ID NO: 134286 - protein, 10 aa, Homo Sapiens
RVINEEYKIW

SEQ ID NO: 134287 - protein, 10 aa, Homo Sapiens
RVLKEDKERW

SEQ ID NO: 134288 - protein, 10 aa, Homo Sapiens
RVSPALGITW

SEQ ID NO: 134289 - protein, 10 aa, Homo Sapiens
SAQGSESHSL

SEQ ID NO: 134290 - protein, 10 aa, Homo Sapiens
SAYDSKADIW

SEQ ID NO: 134291 - protein, 10 aa, Homo Sapiens
SDPDEVARRW

SEQ ID NO: 134292 - protein, 10 aa, Homo Sapiens
SIDPNTYITW

SEQ ID NO: 134293 - protein, 10 aa, Homo Sapiens
SKSVGQILLW

SEQ ID NO: 134294 - protein, 10 aa, Homo Sapiens
SPSSSPTHLW

SEQ ID NO: 134295 - protein, 10 aa, Homo Sapiens
SSACLIGDAW

SEQ ID NO: 134296 - protein, 10 aa, Homo Sapiens
SSFASSHEVW

SEQ ID NO: 134297 - protein, 10 aa, Homo Sapiens
SSGPSDKMKW

SEQ ID NO: 134298 - protein, 10 aa, Homo Sapiens
SSLGAPVHLW

SEQ ID NO: 134299 - protein, 10 aa, Homo Sapiens
STAREIECFW

SEQ ID NO: 134300 - protein, 10 aa, Homo Sapiens
STDGSCTVRW

SEQ ID NO: 134301 - protein, 10 aa, Homo Sapiens
STLRELGQTW

SEQ ID NO: 134302 - protein, 10 aa, Homo Sapiens
SVIKNLQSRW

SEQ ID NO: 134303 - protein, 10 aa, Homo Sapiens
TAQSDNKITW

SEQ ID NO: 134304 - protein, 10 aa, Homo Sapiens
TIPDIKKDRW

SEQ ID NO: 134305 - protein, 10 aa, Homo Sapiens
TSDPGGLASW

SEQ ID NO: 134306 - protein, 10 aa, Homo Sapiens
TSLPLDFGTW

SEQ ID NO: 134307 - protein, 10 aa, Homo Sapiens
TSLVSDGETW

SEQ ID NO: 134308 - protein, 10 aa, Homo Sapiens
TSSSSVRVEW

SEQ ID NO: 134309 - protein, 10 aa, Homo Sapiens
TVDIPENVDI

SEQ ID NO: 134310 - protein, 10 aa, Homo Sapiens
TVDPCHKFTW

SEQ ID NO: 134311 - protein, 10 aa, Homo Sapiens
VAIKDKQVKY

SEQ ID NO: 134312 - protein, 10 aa, Homo Sapiens
VIVPADPTLW

SEQ ID NO: 134313 - protein, 10 aa, Homo Sapiens
VLDPHTSHSW

SEQ ID NO: 134314 - protein, 10 aa, Homo Sapiens
VSAKEKYYVW

SEQ ID NO: 134315 - protein, 10 aa, Homo Sapiens
VSDPLSDLKW

SEQ ID NO: 134316 - protein, 10 aa, Homo Sapiens
VSEAGTHQEW

SEQ ID NO: 134317 - protein, 10 aa, Homo Sapiens
VSGPSGSDLW

SEQ ID NO: 134318 - protein, 10 aa, Homo Sapiens
VSHPDAGAAW

SEQ ID NO: 134319 - protein, 10 aa, Homo Sapiens
VSIFPDSGHF

SEQ ID NO: 134320 - protein, 10 aa, Homo Sapiens
VSILESLDKW

SEQ ID NO: 134321 - protein, 10 aa, Homo Sapiens
VSLDETQHIW

SEQ ID NO: 134322 - protein, 10 aa, Homo Sapiens
VSQKISKTRW

SEQ ID NO: 134323 - protein, 10 aa, Homo Sapiens
VSVPDTGSIW

SEQ ID NO: 134324 - protein, 10 aa, Homo Sapiens
VSWDEKGMTW

SEQ ID NO: 134325 - protein, 10 aa, Homo Sapiens
VTARLVGVLW

SEQ ID NO: 134326 - protein, 10 aa, Homo Sapiens
VTIRDYGVSW

SEQ ID NO: 134327 - protein, 10 aa, Homo Sapiens
VTNKSQIRTW

SEQ ID NO: 134328 - protein, 10 aa, Homo Sapiens
VTVPANVQRW

SEQ ID NO: 134329 - protein, 10 aa, Homo Sapiens
YACRVNHVTL

SEQ ID NO: 134330 - protein, 10 aa, Homo Sapiens
YADKNLIAKW

SEQ ID NO: 134331 - protein, 10 aa, Homo Sapiens
YSESLVHESW

SEQ ID NO: 134332 - protein, 10 aa, Homo Sapiens
YSVDENGQRW

SEQ ID NO: 134333 - protein, 10 aa, Homo Sapiens
YSVKGQEDGW

SEQ ID NO: 134334 - protein, 10 aa, Homo Sapiens
YTNHFTQEQW

SEQ ID NO: 134335 - protein, 10 aa, Homo Sapiens
YTVKISNYGW

SEQ ID NO: 134336 - protein, 11 aa, Homo Sapiens
AACPDPSLSVW

SEQ ID NO: 134337 - protein, 11 aa, Homo Sapiens
AACPVLVGNKW

SEQ ID NO: 134338 - protein, 11 aa, Homo Sapiens
AAFNKDALLNW

SEQ ID NO: 134339 - protein, 11 aa, Homo Sapiens
AAFPAEKESEW

SEQ ID NO: 134340 - protein, 11 aa, Homo Sapiens
AALDSRKNYNW

SEQ ID NO: 134341 - protein, 11 aa, Homo Sapiens
AAWRDEDDYTW

SEQ ID NO: 134342 - protein, 11 aa, Homo Sapiens
AEQRGELAIKD

SEQ ID NO: 134343 - protein, 11 aa, Homo Sapiens
AREGNHKPIDY

SEQ ID NO: 134344 - protein, 11 aa, Homo Sapiens
ASGIRGAQAGW

SEQ ID NO: 134345 - protein, 11 aa, Homo Sapiens
ASIKDPKDLKF

SEQ ID NO: 134346 - protein, 11 aa, Homo Sapiens
ASITSEVFNKF

SEQ ID NO: 134347 - protein, 11 aa, Homo Sapiens
ASLDLMIRLLE

SEQ ID NO: 134348 - protein, 11 aa, Homo Sapiens
ASLPSELIVHI

SEQ ID NO: 134349 - protein, 11 aa, Homo Sapiens
ASLQNERDHLW

SEQ ID NO: 134350 - protein, 11 aa, Homo Sapiens
ASMPRDIYQDY

SEQ ID NO: 134351 - protein, 11 aa, Homo Sapiens
ASVSEHQPTTW

SEQ ID NO: 134352 - protein, 11 aa, Homo Sapiens
ASYSGKAADVW

SEQ ID NO: 134353 - protein, 11 aa, Homo Sapiens
ATDPNILGRTW

SEQ ID NO: 134354 - protein, 11 aa, Homo Sapiens
ATFHQRGIALW

SEQ ID NO: 134355 - protein, 11 aa, Homo Sapiens
ATIKDIREHEW

SEQ ID NO: 134356 - protein, 11 aa, Homo Sapiens
ATVASGIPAGW

SEQ ID NO: 134357 - protein, 11 aa, Homo Sapiens
ATVPNTIVVNW

SEQ ID NO: 134358 - protein, 11 aa, Homo Sapiens
AVSTIETVPYW

SEQ ID NO: 134359 - protein, 11 aa, Homo Sapiens
DTGRPSTTVRY

SEQ ID NO: 134360 - protein, 11 aa, Homo Sapiens
FAYKDQNENRW

SEQ ID NO: 134361 - protein, 11 aa, Homo Sapiens
FGDPASSLFRW

SEQ ID NO: 134362 - protein, 11 aa, Homo Sapiens
FSDKESGKQKF

SEQ ID NO: 134363 - protein, 11 aa, Homo Sapiens
GLSSILDAARW

SEQ ID NO: 134364 - protein, 11 aa, Homo Sapiens
GSDTSDIVHIW

SEQ ID NO: 134365 - protein, 11 aa, Homo Sapiens
GTFEYEYSQRW

SEQ ID NO: 134366 - protein, 11 aa, Homo Sapiens
HSEAKTSGLLW

SEQ ID NO: 134367 - protein, 11 aa, Homo Sapiens
HSFNQSSSSQW

SEQ ID NO: 134368 - protein, 11 aa, Homo Sapiens
HSFYPTPALQW

SEQ ID NO: 134369 - protein, 11 aa, Homo Sapiens
HSMRQAELAQW

SEQ ID NO: 134370 - protein, 11 aa, Homo Sapiens
HSVTASGAEHW

SEQ ID NO: 134371 - protein, 11 aa, Homo Sapiens
HSYPNPEYDNW

SEQ ID NO: 134372 - protein, 11 aa, Homo Sapiens
HTAPSGVGSSW

SEQ ID NO: 134373 - protein, 11 aa, Homo Sapiens
HTFFDHQDQVW

SEQ ID NO: 134374 - protein, 11 aa, Homo Sapiens
HTNQDHVHAVW

SEQ ID NO: 134375 - protein, 11 aa, Homo Sapiens
ISAPDKRIYQF

SEQ ID NO: 134376 - protein, 11 aa, Homo Sapiens
ISDHEATLRCW

SEQ ID NO: 134377 - protein, 11 aa, Homo Sapiens
ISDSNPFLTQW

SEQ ID NO: 134378 - protein, 11 aa, Homo Sapiens
ISKKHTLGEVW

SEQ ID NO: 134379 - protein, 11 aa, Homo Sapiens
ISKPVGFGEEF

SEQ ID NO: 134380 - protein, 11 aa, Homo Sapiens
ISLPTSKNWTF

SEQ ID NO: 134381 - protein, 11 aa, Homo Sapiens
ISMANDLKEVW

SEQ ID NO: 134382 - protein, 11 aa, Homo Sapiens
ISNPVTKEMLF

SEQ ID NO: 134383 - protein, 11 aa, Homo Sapiens
ISVHDSVISQW

SEQ ID NO: 134384 - protein, 11 aa, Homo Sapiens
ITIPDIKKDRW

SEQ ID NO: 134385 - protein, 11 aa, Homo Sapiens
ITQKALQSQSW

SEQ ID NO: 134386 - protein, 11 aa, Homo Sapiens
ITQKEFMNQHW

SEQ ID NO: 134387 - protein, 11 aa, Homo Sapiens
IVDPNGLARLW

SEQ ID NO: 134388 - protein, 11 aa, Homo Sapiens
KAAKDKGFAKW

SEQ ID NO: 134389 - protein, 11 aa, Homo Sapiens
KAFPHSSSLRY

SEQ ID NO: 134390 - protein, 11 aa, Homo Sapiens
KAHLTSAADIW

SEQ ID NO: 134391 - protein, 11 aa, Homo Sapiens
KAIEEGVNHMW

SEQ ID NO: 134392 - protein, 11 aa, Homo Sapiens
KAITTSLTTKW

SEQ ID NO: 134393 - protein, 11 aa, Homo Sapiens
KALKEKEKASW

SEQ ID NO: 134394 - protein, 11 aa, Homo Sapiens
KALPSPAATIW

SEQ ID NO: 134395 - protein, 11 aa, Homo Sapiens
KAQQDKLNTRW

SEQ ID NO: 134396 - protein, 11 aa, Homo Sapiens
KASGFEESMKW

SEQ ID NO: 134397 - protein, 11 aa, Homo Sapiens
KAVDCLLDSKW

SEQ ID NO: 134398 - protein, 11 aa, Homo Sapiens
KGDPQSPGRHW

SEQ ID NO: 134399 - protein, 11 aa, Homo Sapiens
KGFYDKDSSGW

SEQ ID NO: 134400 - protein, 11 aa, Homo Sapiens
KIHPQTIIAGW

SEQ ID NO: 134401 - protein, 11 aa, Homo Sapiens
KIQPDTIIQVW

SEQ ID NO: 134402 - protein, 11 aa, Homo Sapiens
KIYENEDQLLW

SEQ ID NO: 134403 - protein, 11 aa, Homo Sapiens
KLKPFIDREWW

SEQ ID NO: 134404 - protein, 11 aa, Homo Sapiens
KLSPEELLLRW

SEQ ID NO: 134405 - protein, 11 aa, Homo Sapiens
KLYEEKTGNAW

SEQ ID NO: 134406 - protein, 11 aa, Homo Sapiens
KNINIPTLFQW

SEQ ID NO: 134407 - protein, 11 aa, Homo Sapiens
KSANSELGGIW

SEQ ID NO: 134408 - protein, 11 aa, Homo Sapiens
KSCGIQDIFVF

SEQ ID NO: 134409 - protein, 11 aa, Homo Sapiens
KSDASLLGSLW

SEQ ID NO: 134410 - protein, 11 aa, Homo Sapiens
KSEEITTGSAW

SEQ ID NO: 134411 - protein, 11 aa, Homo Sapiens
KSFEGNVFMYY

SEQ ID NO: 134412 - protein, 11 aa, Homo Sapiens
KSFETDTNLNF

SEQ ID NO: 134413 - protein, 11 aa, Homo Sapiens
KSFGSAQEFAW

SEQ ID NO: 134414 - protein, 11 aa, Homo Sapiens
KSFGWPSFITY

SEQ ID NO: 134415 - protein, 11 aa, Homo Sapiens
KSFIQKKMQNW

SEQ ID NO: 134416 - protein, 11 aa, Homo Sapiens
KSFLPEVVNTW

SEQ ID NO: 134417 - protein, 11 aa, Homo Sapiens
KSFPDTGSLNL

SEQ ID NO: 134418 - protein, 11 aa, Homo Sapiens
KSFSDTLKTYF

SEQ ID NO: 134419 - protein, 11 aa, Homo Sapiens
KSFSKSDLVNW

SEQ ID NO: 134420 - protein, 11 aa, Homo Sapiens
KSIANQIQEDW

SEQ ID NO: 134421 - protein, 11 aa, Homo Sapiens
KSIDAGPVDAW

SEQ ID NO: 134422 - protein, 11 aa, Homo Sapiens
KSIEDFAHSSF

SEQ ID NO: 134423 - protein, 11 aa, Homo Sapiens
KSIPSAEVEKW

SEQ ID NO: 134424 - protein, 11 aa, Homo Sapiens
KSKAMTGVEQW

SEQ ID NO: 134425 - protein, 11 aa, Homo Sapiens
KSKLDAEVSKW

SEQ ID NO: 134426 - protein, 11 aa, Homo Sapiens
KSLDEAIDMRF

SEQ ID NO: 134427 - protein, 11 aa, Homo Sapiens
KSLKENLARCW

SEQ ID NO: 134428 - protein, 11 aa, Homo Sapiens
KSLKVDPRACF

SEQ ID NO: 134429 - protein, 11 aa, Homo Sapiens
KSLPCFEPYEF

SEQ ID NO: 134430 - protein, 11 aa, Homo Sapiens
KSLPEEDVAEI

SEQ ID NO: 134431 - protein, 11 aa, Homo Sapiens
KSLPEFPDSGF

SEQ ID NO: 134432 - protein, 11 aa, Homo Sapiens
KSLPKATVESW

SEQ ID NO: 134433 - protein, 11 aa, Homo Sapiens
KSLPSEASEQY

SEQ ID NO: 134434 - protein, 11 aa, Homo Sapiens
KSMETHIMHTF

SEQ ID NO: 134435 - protein, 11 aa, Homo Sapiens
KSNEDQSMGNW

SEQ ID NO: 134436 - protein, 11 aa, Homo Sapiens
KSRPLGAEDLW

SEQ ID NO: 134437 - protein, 11 aa, Homo Sapiens
KSSPQIPHQTY

SEQ ID NO: 134438 - protein, 11 aa, Homo Sapiens
KSTPTGLFGYW

SEQ ID NO: 134439 - protein, 11 aa, Homo Sapiens
KSTSGLTDITW

SEQ ID NO: 134440 - protein, 11 aa, Homo Sapiens
KSVGKIEHSFW

SEQ ID NO: 134441 - protein, 11 aa, Homo Sapiens
KSVSAAEQQLW

SEQ ID NO: 134442 - protein, 11 aa, Homo Sapiens
KSVTAHLAAKW

SEQ ID NO: 134443 - protein, 11 aa, Homo Sapiens
KSWPEGHFATI

SEQ ID NO: 134444 - protein, 11 aa, Homo Sapiens
KSYELPDGQVI

SEQ ID NO: 134445 - protein, 11 aa, Homo Sapiens
KSYLGSEADVW

SEQ ID NO: 134446 - protein, 11 aa, Homo Sapiens
KSYPGSQSQLF

SEQ ID NO: 134447 - protein, 11 aa, Homo Sapiens
KSYPNEEKDAW

SEQ ID NO: 134448 - protein, 11 aa, Homo Sapiens
KTASQVHLMKF

SEQ ID NO: 134449 - protein, 11 aa, Homo Sapiens
KTAVICQLDYW

SEQ ID NO: 134450 - protein, 11 aa, Homo Sapiens
KTDPVDIYKSW

SEQ ID NO: 134451 - protein, 11 aa, Homo Sapiens
KTFLHDPLVEW

SEQ ID NO: 134452 - protein, 11 aa, Homo Sapiens
KTHEITQLESW

SEQ ID NO: 134453 - protein, 11 aa, Homo Sapiens
KTLPADVQNYY

SEQ ID NO: 134454 - protein, 11 aa, Homo Sapiens
KTLVNPANVTF

SEQ ID NO: 134455 - protein, 11 aa, Homo Sapiens
KTMEQLENVYF

SEQ ID NO: 134456 - protein, 11 aa, Homo Sapiens
KTMVGHRTEVW

SEQ ID NO: 134457 - protein, 11 aa, Homo Sapiens
KTNGLSEDLIW

SEQ ID NO: 134458 - protein, 11 aa, Homo Sapiens
KTVSAVCSLAW

SEQ ID NO: 134459 - protein, 11 aa, Homo Sapiens
KTVYTGIDHHW

SEQ ID NO: 134460 - protein, 11 aa, Homo Sapiens
KTWAEIRQQRW

SEQ ID NO: 134461 - protein, 11 aa, Homo Sapiens
KTYPVNTPERW

SEQ ID NO: 134462 - protein, 11 aa, Homo Sapiens
KTYSNEVVTLW

SEQ ID NO: 134463 - protein, 11 aa, Homo Sapiens
KVDPAKDRELW

SEQ ID NO: 134464 - protein, 11 aa, Homo Sapiens
KVFAEDQDMQY

SEQ ID NO: 134465 - protein, 11 aa, Homo Sapiens
KVIHELANERW

SEQ ID NO: 134466 - protein, 11 aa, Homo Sapiens
KVIHEQVNHRW

SEQ ID NO: 134467 - protein, 11 aa, Homo Sapiens
KVLDDMEGNQW

SEQ ID NO: 134468 - protein, 11 aa, Homo Sapiens
KVLNEECDQNW

SEQ ID NO: 134469 - protein, 11 aa, Homo Sapiens
KVLPPNHRVVW

SEQ ID NO: 134470 - protein, 11 aa, Homo Sapiens
KVLSPKYLGSW

SEQ ID NO: 134471 - protein, 11 aa, Homo Sapiens
KVSPEEITSLW

SEQ ID NO: 134472 - protein, 11 aa, Homo Sapiens
KVYENDDQLLW

SEQ ID NO: 134473 - protein, 11 aa, Homo Sapiens
KVYENEDQLLW

SEQ ID NO: 134474 - protein, 11 aa, Homo Sapiens
LADPDEVARRW

SEQ ID NO: 134475 - protein, 11 aa, Homo Sapiens
LMDPSGNAHKW

SEQ ID NO: 134476 - protein, 11 aa, Homo Sapiens
LSALPADTQAW

SEQ ID NO: 134477 - protein, 11 aa, Homo Sapiens
LSDPDEVARRW

SEQ ID NO: 134478 - protein, 11 aa, Homo Sapiens
LSFDAPGRLLW

SEQ ID NO: 134479 - protein, 11 aa, Homo Sapiens
LSFGDAAQTLW

SEQ ID NO: 134480 - protein, 11 aa, Homo Sapiens
LSQVEGEHQLW

SEQ ID NO: 134481 - protein, 11 aa, Homo Sapiens
LSSDDANVLVW

SEQ ID NO: 134482 - protein, 11 aa, Homo Sapiens
LTAPSSPGSSW

SEQ ID NO: 134483 - protein, 11 aa, Homo Sapiens
LTVKLPDGYEF

SEQ ID NO: 134484 - protein, 11 aa, Homo Sapiens
LVDPLNMHVTW

SEQ ID NO: 134485 - protein, 11 aa, Homo Sapiens
MTDPDEVARRW

SEQ ID NO: 134486 - protein, 11 aa, Homo Sapiens
QAIRNDETGLW

SEQ ID NO: 134487 - protein, 11 aa, Homo Sapiens
QALQDSRNYGW

SEQ ID NO: 134488 - protein, 11 aa, Homo Sapiens
QAWRAATLEGW

SEQ ID NO: 134489 - protein, 11 aa, Homo Sapiens
QSDPSGAYFAW

SEQ ID NO: 134490 - protein, 11 aa, Homo Sapiens
QSVPASTGLGW

SEQ ID NO: 134491 - protein, 11 aa, Homo Sapiens
QTDPSGTYHAW

SEQ ID NO: 134492 - protein, 11 aa, Homo Sapiens
QTIRLPAQSIW

SEQ ID NO: 134493 - protein, 11 aa, Homo Sapiens
RAADAVEDLRW

SEQ ID NO: 134494 - protein, 11 aa, Homo Sapiens
RAAKPEQIQKW

SEQ ID NO: 134495 - protein, 11 aa, Homo Sapiens
RAALSDTVALW

SEQ ID NO: 134496 - protein, 11 aa, Homo Sapiens
RACPAVVRATF

SEQ ID NO: 134497 - protein, 11 aa, Homo Sapiens
RAFQAHKEENW

SEQ ID NO: 134498 - protein, 11 aa, Homo Sapiens
RAFTCDDLFRF

SEQ ID NO: 134499 - protein, 11 aa, Homo Sapiens
RAIAAHERQAW

SEQ ID NO: 134500 - protein, 11 aa, Homo Sapiens
RALEAEKRALW

SEQ ID NO: 134501 - protein, 11 aa, Homo Sapiens
RALGTEVIQLF

SEQ ID NO: 134502 - protein, 11 aa, Homo Sapiens
RALGWGSLYAW

SEQ ID NO: 134503 - protein, 11 aa, Homo Sapiens
RALPSLDIVVW

SEQ ID NO: 134504 - protein, 11 aa, Homo Sapiens
RALQASALNAW

SEQ ID NO: 134505 - protein, 11 aa, Homo Sapiens
RAVREDLGGCW

SEQ ID NO: 134506 - protein, 11 aa, Homo Sapiens
RFVPLPASAKW

SEQ ID NO: 134507 - protein, 11 aa, Homo Sapiens
RILPQDVILKF

SEQ ID NO: 134508 - protein, 11 aa, Homo Sapiens
RIVSVDKQQQW

SEQ ID NO: 134509 - protein, 11 aa, Homo Sapiens
RLFDEGTISKW

SEQ ID NO: 134510 - protein, 11 aa, Homo Sapiens
RSDPNSESLYF

SEQ ID NO: 134511 - protein, 11 aa, Homo Sapiens
RSFGWDSSEAW

SEQ ID NO: 134512 - protein, 11 aa, Homo Sapiens
RSFIFKGEDNW

SEQ ID NO: 134513 - protein, 11 aa, Homo Sapiens
RSIAECAVFTW

SEQ ID NO: 134514 - protein, 11 aa, Homo Sapiens
RSIESTLDDLF

SEQ ID NO: 134515 - protein, 11 aa, Homo Sapiens
RSIPAITRYWF

SEQ ID NO: 134516 - protein, 11 aa, Homo Sapiens
RSIPVNEKDTL

SEQ ID NO: 134517 - protein, 11 aa, Homo Sapiens
RSISQGLTWTW

SEQ ID NO: 134518 - protein, 11 aa, Homo Sapiens
RSLPDPNLITF

SEQ ID NO: 134519 - protein, 11 aa, Homo Sapiens
RSLPHITDVSW

SEQ ID NO: 134520 - protein, 11 aa, Homo Sapiens
RSLTAVTCTVW

SEQ ID NO: 134521 - protein, 11 aa, Homo Sapiens
RSNPKLKDLYI

SEQ ID NO: 134522 - protein, 11 aa, Homo Sapiens
RSQMSMPFQQW

SEQ ID NO: 134523 - protein, 11 aa, Homo Sapiens
RSQVVIPILQW

SEQ ID NO: 134524 - protein, 11 aa, Homo Sapiens
RSSSYLDNLVW

SEQ ID NO: 134525 - protein, 11 aa, Homo Sapiens
RSSYLANEILW

SEQ ID NO: 134526 - protein, 11 aa, Homo Sapiens
RSTELDSNWNW

SEQ ID NO: 134527 - protein, 11 aa, Homo Sapiens
RSYQDPSNAQF

SEQ ID NO: 134528 - protein, 11 aa, Homo Sapiens
RSYYSVQTAEW

SEQ ID NO: 134529 - protein, 11 aa, Homo Sapiens
RTFSSLHVERW

SEQ ID NO: 134530 - protein, 11 aa, Homo Sapiens
RTILQHLSEAW

SEQ ID NO: 134531 - protein, 11 aa, Homo Sapiens
RTINDQDFFLY

SEQ ID NO: 134532 - protein, 11 aa, Homo Sapiens
RTIQTPIGSTW

SEQ ID NO: 134533 - protein, 11 aa, Homo Sapiens
RTLGTPDEVVW

SEQ ID NO: 134534 - protein, 11 aa, Homo Sapiens
RTLPTNTLMGF

SEQ ID NO: 134535 - protein, 11 aa, Homo Sapiens
RTLPVDSSHGF

SEQ ID NO: 134536 - protein, 11 aa, Homo Sapiens
RTNPNSGDFRF

SEQ ID NO: 134537 - protein, 11 aa, Homo Sapiens
RTRNEELAQTW

SEQ ID NO: 134538 - protein, 11 aa, Homo Sapiens
RTSGLCVPLTW

SEQ ID NO: 134539 - protein, 11 aa, Homo Sapiens
RTTPATELDAW

SEQ ID NO: 134540 - protein, 11 aa, Homo Sapiens
RTVYPEEHSRW

SEQ ID NO: 134541 - protein, 11 aa, Homo Sapiens
RVCQQPGLSLW

SEQ ID NO: 134542 - protein, 11 aa, Homo Sapiens
RVDPNGSRYLL

SEQ ID NO: 134543 - protein, 11 aa, Homo Sapiens
RVDTSPTPVSW

SEQ ID NO: 134544 - protein, 11 aa, Homo Sapiens
RVFEDESGKHW

SEQ ID NO: 134545 - protein, 11 aa, Homo Sapiens
RVISELQEACW

SEQ ID NO: 134546 - protein, 11 aa, Homo Sapiens
RVLPPSHRVTW

SEQ ID NO: 134547 - protein, 11 aa, Homo Sapiens
RVLPYPFTHHW

SEQ ID NO: 134548 - protein, 11 aa, Homo Sapiens
RVVDGAVGAQW

SEQ ID NO: 134549 - protein, 11 aa, Homo Sapiens
RVYQSLCPTSW

SEQ ID NO: 134550 - protein, 11 aa, Homo Sapiens
SALGPDIICRW

SEQ ID NO: 134551 - protein, 11 aa, Homo Sapiens
SASPDATIRIW

SEQ ID NO: 134552 - protein, 11 aa, Homo Sapiens
SGSSDGTIRLW

SEQ ID NO: 134553 - protein, 11 aa, Homo Sapiens
SPSSVTGNALW

SEQ ID NO: 134554 - protein, 11 aa, Homo Sapiens
SSATDAAIRVW

SEQ ID NO: 134555 - protein, 11 aa, Homo Sapiens
TSDPLARLQMF

SEQ ID NO: 134556 - protein, 11 aa, Homo Sapiens
TSENITQKVVW

SEQ ID NO: 134557 - protein, 11 aa, Homo Sapiens
TSYRDFLGTNW

SEQ ID NO: 134558 - protein, 11 aa, Homo Sapiens
TTVPNTIVVSW

SEQ ID NO: 134559 - protein, 11 aa, Homo Sapiens
VAIRDGAYSLF

SEQ ID NO: 134560 - protein, 11 aa, Homo Sapiens
VGLPAAGKTTW

SEQ ID NO: 134561 - protein, 11 aa, Homo Sapiens
VSAPAGGKASW

SEQ ID NO: 134562 - protein, 11 aa, Homo Sapiens
VSDHEATLRCW

SEQ ID NO: 134563 - protein, 11 aa, Homo Sapiens
VSEPGDPKVTW

SEQ ID NO: 134564 - protein, 11 aa, Homo Sapiens
VSFEEDDKIRW

SEQ ID NO: 134565 - protein, 11 aa, Homo Sapiens
VSFPDVEKAEW

SEQ ID NO: 134566 - protein, 11 aa, Homo Sapiens
VSLPAPGVPAW

SEQ ID NO: 134567 - protein, 11 aa, Homo Sapiens
VSLPSHLNISY

SEQ ID NO: 134568 - protein, 11 aa, Homo Sapiens
VSLQASSGHMW

SEQ ID NO: 134569 - protein, 11 aa, Homo Sapiens
VSYRNPAEGTW

SEQ ID NO: 134570 - protein, 11 aa, Homo Sapiens
VTIHEKQKESW

SEQ ID NO: 134571 - protein, 11 aa, Homo Sapiens
VTIPSTCSEIW

SEQ ID NO: 134572 - protein, 11 aa, Homo Sapiens
VTLHDQGTAQW

SEQ ID NO: 134573 - protein, 11 aa, Homo Sapiens
VVSPHEDMRTW

SEQ ID NO: 134574 - protein, 11 aa, Homo Sapiens
VVVPAEWIKNW

SEQ ID NO: 134575 - protein, 11 aa, Homo Sapiens
YACPALIKSIW

SEQ ID NO: 134576 - protein, 11 aa, Homo Sapiens
YGFRPDEPYYY

SEQ ID NO: 134577 - protein, 11 aa, Homo Sapiens
YMDPTGKTRTW

SEQ ID NO: 134578 - protein, 8 aa, Homo Sapiens
AANDARLL

SEQ ID NO: 134579 - protein, 8 aa, Homo Sapiens
AANIPRSI

SEQ ID NO: 134580 - protein, 8 aa, Homo Sapiens
AAQVARVL

SEQ ID NO: 134581 - protein, 8 aa, Homo Sapiens
AELAARIL

SEQ ID NO: 134582 - protein, 8 aa, Homo Sapiens
AGNIARTI

SEQ ID NO: 134583 - protein, 8 aa, Homo Sapiens
ASFLARRL

SEQ ID NO: 134584 - protein, 8 aa, Homo Sapiens
ASLGARHI

SEQ ID NO: 134585 - protein, 8 aa, Homo Sapiens
ASLKAKLL

SEQ ID NO: 134586 - protein, 8 aa, Homo Sapiens
ASMPSRTI

SEQ ID NO: 134587 - protein, 8 aa, Homo Sapiens
ASQSARFY

SEQ ID NO: 134588 - protein, 8 aa, Homo Sapiens
AVSLQRKL

SEQ ID NO: 134589 - protein, 8 aa, Homo Sapiens
EEQLQQIR

SEQ ID NO: 134590 - protein, 8 aa, Homo Sapiens
FANNPREL

SEQ ID NO: 134591 - protein, 8 aa, Homo Sapiens
FSADPRHI

SEQ ID NO: 134592 - protein, 8 aa, Homo Sapiens
FSATPRYM

SEQ ID NO: 134593 - protein, 8 aa, Homo Sapiens
FSNAARVL

SEQ ID NO: 134594 - protein, 8 aa, Homo Sapiens
FSNVGRKI

SEQ ID NO: 134595 - protein, 8 aa, Homo Sapiens
FSQPARSF

SEQ ID NO: 134596 - protein, 8 aa, Homo Sapiens
FTQPSRLL

SEQ ID NO: 134597 - protein, 8 aa, Homo Sapiens
HANLARAL

SEQ ID NO: 134598 - protein, 8 aa, Homo Sapiens
HSAEPRLL

SEQ ID NO: 134599 - protein, 8 aa, Homo Sapiens
HSQSPRVI

SEQ ID NO: 134600 - protein, 8 aa, Homo Sapiens
HSTLPRTL

SEQ ID NO: 134601 - protein, 8 aa, Homo Sapiens
HSYLSRLI

SEQ ID NO: 134602 - protein, 8 aa, Homo Sapiens
HTHIPRLI

SEQ ID NO: 134603 - protein, 8 aa, Homo Sapiens
HTHVPRLI

SEQ ID NO: 134604 - protein, 8 aa, Homo Sapiens
HTNLPRSI

SEQ ID NO: 134605 - protein, 8 aa, Homo Sapiens
HTNLSRKI

SEQ ID NO: 134606 - protein, 8 aa, Homo Sapiens
IAKQSVTI

SEQ ID NO: 134607 - protein, 8 aa, Homo Sapiens
IAQLARQY

SEQ ID NO: 134608 - protein, 8 aa, Homo Sapiens
IGTKGRLI

SEQ ID NO: 134609 - protein, 8 aa, Homo Sapiens
IQQTARSI

SEQ ID NO: 134610 - protein, 8 aa, Homo Sapiens
ISAKARYF

SEQ ID NO: 134611 - protein, 8 aa, Homo Sapiens
ISKTARLL

SEQ ID NO: 134612 - protein, 8 aa, Homo Sapiens
ISNSPRVI

SEQ ID NO: 134613 - protein, 8 aa, Homo Sapiens
ISNTAISI

SEQ ID NO: 134614 - protein, 8 aa, Homo Sapiens
ISQIVSSI

SEQ ID NO: 134615 - protein, 8 aa, Homo Sapiens
ISQVGRVY

SEQ ID NO: 134616 - protein, 8 aa, Homo Sapiens
ISRTPVLM

SEQ ID NO: 134617 - protein, 8 aa, Homo Sapiens
ISVTARRL

SEQ ID NO: 134618 - protein, 8 aa, Homo Sapiens
ITVVARQI

SEQ ID NO: 134619 - protein, 8 aa, Homo Sapiens
KAAPSRLF

SEQ ID NO: 134620 - protein, 8 aa, Homo Sapiens
KAEKARLL

SEQ ID NO: 134621 - protein, 8 aa, Homo Sapiens
KAGLPRSI

SEQ ID NO: 134622 - protein, 8 aa, Homo Sapiens
KAKGPVTI

SEQ ID NO: 134623 - protein, 8 aa, Homo Sapiens
KAKVAIKI

SEQ ID NO: 134624 - protein, 8 aa, Homo Sapiens
KAMLAKLM

SEQ ID NO: 134625 - protein, 8 aa, Homo Sapiens
KARLPLRL

SEQ ID NO: 134626 - protein, 8 aa, Homo Sapiens
KFQEARKL

SEQ ID NO: 134627 - protein, 8 aa, Homo Sapiens
KGLSARII

SEQ ID NO: 134628 - protein, 8 aa, Homo Sapiens
KLQRARLL

SEQ ID NO: 134629 - protein, 8 aa, Homo Sapiens
KSALALRW

SEQ ID NO: 134630 - protein, 8 aa, Homo Sapiens
KSFILQKY

SEQ ID NO: 134631 - protein, 8 aa, Homo Sapiens
KSFKAALI

SEQ ID NO: 134632 - protein, 8 aa, Homo Sapiens
KSHRVLKW

SEQ ID NO: 134633 - protein, 8 aa, Homo Sapiens
KSHVGRLL

SEQ ID NO: 134634 - protein, 8 aa, Homo Sapiens
KSIEVRKF

SEQ ID NO: 134635 - protein, 8 aa, Homo Sapiens
KSILSRHL

SEQ ID NO: 134636 - protein, 8 aa, Homo Sapiens
KSKIVSEI

SEQ ID NO: 134637 - protein, 8 aa, Homo Sapiens
KSLQAIKI

SEQ ID NO: 134638 - protein, 8 aa, Homo Sapiens
KSLTAHVI

SEQ ID NO: 134639 - protein, 8 aa, Homo Sapiens
KSLVAFKI

SEQ ID NO: 134640 - protein, 8 aa, Homo Sapiens
KSMISRKL

SEQ ID NO: 134641 - protein, 8 aa, Homo Sapiens
KSNLARVF

SEQ ID NO: 134642 - protein, 8 aa, Homo Sapiens
KSTIANLM

SEQ ID NO: 134643 - protein, 8 aa, Homo Sapiens
KSVDGRQI

SEQ ID NO: 134644 - protein, 8 aa, Homo Sapiens
KSVDPRLI

SEQ ID NO: 134645 - protein, 8 aa, Homo Sapiens
KTIKAQIW

SEQ ID NO: 134646 - protein, 8 aa, Homo Sapiens
KTKKPLLI

SEQ ID NO: 134647 - protein, 8 aa, Homo Sapiens
KTLSPREL

SEQ ID NO: 134648 - protein, 8 aa, Homo Sapiens
KTLTPRKL

SEQ ID NO: 134649 - protein, 8 aa, Homo Sapiens
KTRQAFYL

SEQ ID NO: 134650 - protein, 8 aa, Homo Sapiens
KTSLLRPV

SEQ ID NO: 134651 - protein, 8 aa, Homo Sapiens
KTTVARLI

SEQ ID NO: 134652 - protein, 8 aa, Homo Sapiens
KTVEGREL

SEQ ID NO: 134653 - protein, 8 aa, Homo Sapiens
KTWRPRYF

SEQ ID NO: 134654 - protein, 8 aa, Homo Sapiens
KTWSSRLW

SEQ ID NO: 134655 - protein, 8 aa, Homo Sapiens
KTYPAHAF

SEQ ID NO: 134656 - protein, 8 aa, Homo Sapiens
KVILARQY

SEQ ID NO: 134657 - protein, 8 aa, Homo Sapiens
LAAAARCL

SEQ ID NO: 134658 - protein, 8 aa, Homo Sapiens
LAAEARAI

SEQ ID NO: 134659 - protein, 8 aa, Homo Sapiens
LAFTARKM

SEQ ID NO: 134660 - protein, 8 aa, Homo Sapiens
LAKKPHII

SEQ ID NO: 134661 - protein, 8 aa, Homo Sapiens
LAQEARNI

SEQ ID NO: 134662 - protein, 8 aa, Homo Sapiens
LLSYPRLL

SEQ ID NO: 134663 - protein, 8 aa, Homo Sapiens
LSAEPRYL

SEQ ID NO: 134664 - protein, 8 aa, Homo Sapiens
LSAPARLY

SEQ ID NO: 134665 - protein, 8 aa, Homo Sapiens
LSIPYRLI

SEQ ID NO: 134666 - protein, 8 aa, Homo Sapiens
LSKKPLRY

SEQ ID NO: 134667 - protein, 8 aa, Homo Sapiens
LSLVARLI

SEQ ID NO: 134668 - protein, 8 aa, Homo Sapiens
LSNLPRSF

SEQ ID NO: 134669 - protein, 8 aa, Homo Sapiens
LSQEGRSL

SEQ ID NO: 134670 - protein, 8 aa, Homo Sapiens
LSSQSRQW

SEQ ID NO: 134671 - protein, 8 aa, Homo Sapiens
LSSTPRVI

SEQ ID NO: 134672 - protein, 8 aa, Homo Sapiens
LSTAPRSL

SEQ ID NO: 134673 - protein, 8 aa, Homo Sapiens
LSWKAHRL

SEQ ID NO: 134674 - protein, 8 aa, Homo Sapiens
LTAAARLL

SEQ ID NO: 134675 - protein, 8 aa, Homo Sapiens
LTADARLL

SEQ ID NO: 134676 - protein, 8 aa, Homo Sapiens
LTAQPRLM

SEQ ID NO: 134677 - protein, 8 aa, Homo Sapiens
LTNMSRTL

SEQ ID NO: 134678 - protein, 8 aa, Homo Sapiens
LTRQPFAI

SEQ ID NO: 134679 - protein, 8 aa, Homo Sapiens
LTSTPREI

SEQ ID NO: 134680 - protein, 8 aa, Homo Sapiens
LTTIARTI

SEQ ID NO: 134681 - protein, 8 aa, Homo Sapiens
NVPGEIVE

SEQ ID NO: 134682 - protein, 8 aa, Homo Sapiens
QAIKARNI

SEQ ID NO: 134683 - protein, 8 aa, Homo Sapiens
QALEARLV

SEQ ID NO: 134684 - protein, 8 aa, Homo Sapiens
QALLARNI

SEQ ID NO: 134685 - protein, 8 aa, Homo Sapiens
QAMKARQI

SEQ ID NO: 134686 - protein, 8 aa, Homo Sapiens
QSLHARTL

SEQ ID NO: 134687 - protein, 8 aa, Homo Sapiens
QSMPSREL

SEQ ID NO: 134688 - protein, 8 aa, Homo Sapiens
QTTAPRLL

SEQ ID NO: 134689 - protein, 8 aa, Homo Sapiens
QTTKARFL

SEQ ID NO: 134690 - protein, 8 aa, Homo Sapiens
RALLARLL

SEQ ID NO: 134691 - protein, 8 aa, Homo Sapiens
RALVARLL

SEQ ID NO: 134692 - protein, 8 aa, Homo Sapiens
RALVGREL

SEQ ID NO: 134693 - protein, 8 aa, Homo Sapiens
RGLIARKL

SEQ ID NO: 134694 - protein, 8 aa, Homo Sapiens
RINLPRNI

SEQ ID NO: 134695 - protein, 8 aa, Homo Sapiens
RQLPARTL

SEQ ID NO: 134696 - protein, 8 aa, Homo Sapiens
RSAPARVI

SEQ ID NO: 134697 - protein, 8 aa, Homo Sapiens
RSFIAKRL

SEQ ID NO: 134698 - protein, 8 aa, Homo Sapiens
RSFKAQVF

SEQ ID NO: 134699 - protein, 8 aa, Homo Sapiens
RSHLAALW

SEQ ID NO: 134700 - protein, 8 aa, Homo Sapiens
RSHLGRYL

SEQ ID NO: 134701 - protein, 8 aa, Homo Sapiens
RSISVNQW

SEQ ID NO: 134702 - protein, 8 aa, Homo Sapiens
RSIVPHVF

SEQ ID NO: 134703 - protein, 8 aa, Homo Sapiens
RSLEARII

SEQ ID NO: 134704 - protein, 8 aa, Homo Sapiens
RSLLARTV

SEQ ID NO: 134705 - protein, 8 aa, Homo Sapiens
RSLLGRSL

SEQ ID NO: 134706 - protein, 8 aa, Homo Sapiens
RSLNPRKL

SEQ ID NO: 134707 - protein, 8 aa, Homo Sapiens
RSLQGRAL

SEQ ID NO: 134708 - protein, 8 aa, Homo Sapiens
RSLWGRLL

SEQ ID NO: 134709 - protein, 8 aa, Homo Sapiens
RSMKGLRW

SEQ ID NO: 134710 - protein, 8 aa, Homo Sapiens
RSMNSRVF

SEQ ID NO: 134711 - protein, 8 aa, Homo Sapiens
RSRQPIYM

SEQ ID NO: 134712 - protein, 8 aa, Homo Sapiens
RTALPRIF

SEQ ID NO: 134713 - protein, 8 aa, Homo Sapiens
RTFEPRLL

SEQ ID NO: 134714 - protein, 8 aa, Homo Sapiens
RTFSSRLI

SEQ ID NO: 134715 - protein, 8 aa, Homo Sapiens
RTGPPRLL

SEQ ID NO: 134716 - protein, 8 aa, Homo Sapiens
RTLIPRYF

SEQ ID NO: 134717 - protein, 8 aa, Homo Sapiens
RTLLARLV

SEQ ID NO: 134718 - protein, 8 aa, Homo Sapiens
RTLPSRVF

SEQ ID NO: 134719 - protein, 8 aa, Homo Sapiens
RTMLVRKI

SEQ ID NO: 134720 - protein, 8 aa, Homo Sapiens
RTMQARGF

SEQ ID NO: 134721 - protein, 8 aa, Homo Sapiens
SIKIVKKL

SEQ ID NO: 134722 - protein, 8 aa, Homo Sapiens
SSKVQRLL

SEQ ID NO: 134723 - protein, 8 aa, Homo Sapiens
SSTTARVI

SEQ ID NO: 134724 - protein, 8 aa, Homo Sapiens
STDVAKTF

SEQ ID NO: 134725 - protein, 8 aa, Homo Sapiens
STITSREI

SEQ ID NO: 134726 - protein, 8 aa, Homo Sapiens
STTKARLF

SEQ ID NO: 134727 - protein, 8 aa, Homo Sapiens
TALAARTW

SEQ ID NO: 134728 - protein, 8 aa, Homo Sapiens
TAQQPRLF

SEQ ID NO: 134729 - protein, 8 aa, Homo Sapiens
TEELAYLK

SEQ ID NO: 134730 - protein, 8 aa, Homo Sapiens
TFRIKRFL

SEQ ID NO: 134731 - protein, 8 aa, Homo Sapiens
TSAYARLI

SEQ ID NO: 134732 - protein, 8 aa, Homo Sapiens
TSLQAREL

SEQ ID NO: 134733 - protein, 8 aa, Homo Sapiens
TSQLARHW

SEQ ID NO: 134734 - protein, 8 aa, Homo Sapiens
VALAARKI

SEQ ID NO: 134735 - protein, 8 aa, Homo Sapiens
VQNIARQL

SEQ ID NO: 134736 - protein, 8 aa, Homo Sapiens
VSAQSRFL

SEQ ID NO: 134737 - protein, 8 aa, Homo Sapiens
VSAYPRQL

SEQ ID NO: 134738 - protein, 8 aa, Homo Sapiens
VSLRRAVL

SEQ ID NO: 134739 - protein, 8 aa, Homo Sapiens
VSMIALER

SEQ ID NO: 134740 - protein, 8 aa, Homo Sapiens
VSNAPRLI

SEQ ID NO: 134741 - protein, 8 aa, Homo Sapiens
VTTIARNW

SEQ ID NO: 134742 - protein, 8 aa, Homo Sapiens
VVQKPRQI

SEQ ID NO: 134743 - protein, 8 aa, Homo Sapiens
YAARARLL

SEQ ID NO: 134744 - protein, 8 aa, Homo Sapiens
YAQVARLF

SEQ ID NO: 134745 - protein, 8 aa, Homo Sapiens
YSYPARRW

SEQ ID NO: 134746 - protein, 9 aa, Homo Sapiens
AAIKIIRQL

SEQ ID NO: 134747 - protein, 9 aa, Homo Sapiens
ARLDLERKI

SEQ ID NO: 134748 - protein, 9 aa, Homo Sapiens
ASAVVVWEW

SEQ ID NO: 134749 - protein, 9 aa, Homo Sapiens
ASFDGTFLW

SEQ ID NO: 134750 - protein, 9 aa, Homo Sapiens
ASFHRVQAL

SEQ ID NO: 134751 - protein, 9 aa, Homo Sapiens
ASFPGANII

SEQ ID NO: 134752 - protein, 9 aa, Homo Sapiens
ASLDISRKW

SEQ ID NO: 134753 - protein, 9 aa, Homo Sapiens
ASLNLLRYL

SEQ ID NO: 134754 - protein, 9 aa, Homo Sapiens
ASLYLLRVL

SEQ ID NO: 134755 - protein, 9 aa, Homo Sapiens
ASSTTARVI

SEQ ID NO: 134756 - protein, 9 aa, Homo Sapiens
ASVRSSPTL

SEQ ID NO: 134757 - protein, 9 aa, Homo Sapiens
ASVYIYRYF

SEQ ID NO: 134758 - protein, 9 aa, Homo Sapiens
ATIKTKRTI

SEQ ID NO: 134759 - protein, 9 aa, Homo Sapiens
ATIPNARQF

SEQ ID NO: 134760 - protein, 9 aa, Homo Sapiens
ATLRTSRLL

SEQ ID NO: 134761 - protein, 9 aa, Homo Sapiens
ATNPISRVL

SEQ ID NO: 134762 - protein, 9 aa, Homo Sapiens
FAKRNVKLI

SEQ ID NO: 134763 - protein, 9 aa, Homo Sapiens
FSFKKPFKL

SEQ ID NO: 134764 - protein, 9 aa, Homo Sapiens
FSFKKSFKL

SEQ ID NO: 134765 - protein, 9 aa, Homo Sapiens
FSKRDAQVI

SEQ ID NO: 134766 - protein, 9 aa, Homo Sapiens
FSKRIQKSI

SEQ ID NO: 134767 - protein, 9 aa, Homo Sapiens
FSKRQQPKF

SEQ ID NO: 134768 - protein, 9 aa, Homo Sapiens
FTNRNPRNL

SEQ ID NO: 134769 - protein, 9 aa, Homo Sapiens
FTSKFPRQI

SEQ ID NO: 134770 - protein, 9 aa, Homo Sapiens
FTYKGLRAL

SEQ ID NO: 134771 - protein, 9 aa, Homo Sapiens
GAGGGFGSR

SEQ ID NO: 134772 - protein, 9 aa, Homo Sapiens
GSFSGVRKL

SEQ ID NO: 134773 - protein, 9 aa, Homo Sapiens
GSIQVRWFL

SEQ ID NO: 134774 - protein, 9 aa, Homo Sapiens
GSTDRQVTI

SEQ ID NO: 134775 - protein, 9 aa, Homo Sapiens
GTFRGTRYF

SEQ ID NO: 134776 - protein, 9 aa, Homo Sapiens
GTYDKKVTI

SEQ ID NO: 134777 - protein, 9 aa, Homo Sapiens
GVMALQRKL

SEQ ID NO: 134778 - protein, 9 aa, Homo Sapiens
HALALAWTF

SEQ ID NO: 134779 - protein, 9 aa, Homo Sapiens
HPVLPARSI

SEQ ID NO: 134780 - protein, 9 aa, Homo Sapiens
HSFPLQFTL

SEQ ID NO: 134781 - protein, 9 aa, Homo Sapiens
HSIFSIRIL

SEQ ID NO: 134782 - protein, 9 aa, Homo Sapiens
HSLFLDRLM

SEQ ID NO: 134783 - protein, 9 aa, Homo Sapiens
HSLTQQRLL

SEQ ID NO: 134784 - protein, 9 aa, Homo Sapiens
HSMKPHPAI

SEQ ID NO: 134785 - protein, 9 aa, Homo Sapiens
HSNPSAFNI

SEQ ID NO: 134786 - protein, 9 aa, Homo Sapiens
HSTLVPHEW

SEQ ID NO: 134787 - protein, 9 aa, Homo Sapiens
HSVDQSWSW

SEQ ID NO: 134788 - protein, 9 aa, Homo Sapiens
HSYADMREL

SEQ ID NO: 134789 - protein, 9 aa, Homo Sapiens
HTRELAFQI

SEQ ID NO: 134790 - protein, 9 aa, Homo Sapiens
HTVHVLRYF

SEQ ID NO: 134791 - protein, 9 aa, Homo Sapiens
HTWNGIRHL

SEQ ID NO: 134792 - protein, 9 aa, Homo Sapiens
IIFVPVPQL

SEQ ID NO: 134793 - protein, 9 aa, Homo Sapiens
ISANIFRTL

SEQ ID NO: 134794 - protein, 9 aa, Homo Sapiens
ISDKVLKKI

SEQ ID NO: 134795 - protein, 9 aa, Homo Sapiens
ISFHFTPVL

SEQ ID NO: 134796 - protein, 9 aa, Homo Sapiens
ISFPSGKKI

SEQ ID NO: 134797 - protein, 9 aa, Homo Sapiens
ISFTVKYTY

SEQ ID NO: 134798 - protein, 9 aa, Homo Sapiens
ISIPIGFLF

SEQ ID NO: 134799 - protein, 9 aa, Homo Sapiens
ISKPDVITL

SEQ ID NO: 134800 - protein, 9 aa, Homo Sapiens
ISKQFHHQL

SEQ ID NO: 134801 - protein, 9 aa, Homo Sapiens
ISLAPIHKL

SEQ ID NO: 134802 - protein, 9 aa, Homo Sapiens
ISLKENRHW

SEQ ID NO: 134803 - protein, 9 aa, Homo Sapiens
ISLKKLIVR

SEQ ID NO: 134804 - protein, 9 aa, Homo Sapiens
ISNPVTKEM

SEQ ID NO: 134805 - protein, 9 aa, Homo Sapiens
ISRHQEQFI

SEQ ID NO: 134806 - protein, 9 aa, Homo Sapiens
ISRVKSVRL

SEQ ID NO: 134807 - protein, 9 aa, Homo Sapiens
ISSTVQRQL

SEQ ID NO: 134808 - protein, 9 aa, Homo Sapiens
ISTPVIRTF

SEQ ID NO: 134809 - protein, 9 aa, Homo Sapiens
ISVNIFRTL

SEQ ID NO: 134810 - protein, 9 aa, Homo Sapiens
ISVPIFKQF

SEQ ID NO: 134811 - protein, 9 aa, Homo Sapiens
ITFPGIKLI

SEQ ID NO: 134812 - protein, 9 aa, Homo Sapiens
ITKTVVENI

SEQ ID NO: 134813 - protein, 9 aa, Homo Sapiens
ITNHIHVRI

SEQ ID NO: 134814 - protein, 9 aa, Homo Sapiens
ITQETARLL

SEQ ID NO: 134815 - protein, 9 aa, Homo Sapiens
ITTDVLYTI

SEQ ID NO: 134816 - protein, 9 aa, Homo Sapiens
ITTTVTRVL

SEQ ID NO: 134817 - protein, 9 aa, Homo Sapiens
KAARLVRSL

SEQ ID NO: 134818 - protein, 9 aa, Homo Sapiens
KACDYIREL

SEQ ID NO: 134819 - protein, 9 aa, Homo Sapiens
KACVVKREF

SEQ ID NO: 134820 - protein, 9 aa, Homo Sapiens
KACYLPWVI

SEQ ID NO: 134821 - protein, 9 aa, Homo Sapiens
KAFDRPSLF

SEQ ID NO: 134822 - protein, 9 aa, Homo Sapiens
KAFNLRISF

SEQ ID NO: 134823 - protein, 9 aa, Homo Sapiens
KAFPEHFTY

SEQ ID NO: 134824 - protein, 9 aa, Homo Sapiens
KAFPFHIIF

SEQ ID NO: 134825 - protein, 9 aa, Homo Sapiens
KAFPKAYLL

SEQ ID NO: 134826 - protein, 9 aa, Homo Sapiens
KAIDYIRFL

SEQ ID NO: 134827 - protein, 9 aa, Homo Sapiens
KAIEKNVLF

SEQ ID NO: 134828 - protein, 9 aa, Homo Sapiens
KAINFNFGY

SEQ ID NO: 134829 - protein, 9 aa, Homo Sapiens
KAIVLQKTI

SEQ ID NO: 134830 - protein, 9 aa, Homo Sapiens
KAKITAYVI

SEQ ID NO: 134831 - protein, 9 aa, Homo Sapiens
KAKPVTTNL

SEQ ID NO: 134832 - protein, 9 aa, Homo Sapiens
KAKQLTPRI

SEQ ID NO: 134833 - protein, 9 aa, Homo Sapiens
KAKTDSINI

SEQ ID NO: 134834 - protein, 9 aa, Homo Sapiens
KAKTIQQTL

SEQ ID NO: 134835 - protein, 9 aa, Homo Sapiens
KALELERKL

SEQ ID NO: 134836 - protein, 9 aa, Homo Sapiens
KALEVFPEF

SEQ ID NO: 134837 - protein, 9 aa, Homo Sapiens
KALEYLRQI

SEQ ID NO: 134838 - protein, 9 aa, Homo Sapiens
KALGFAKML

SEQ ID NO: 134839 - protein, 9 aa, Homo Sapiens
KALKIKREL

SEQ ID NO: 134840 - protein, 9 aa, Homo Sapiens
KALQAHWQL

SEQ ID NO: 134841 - protein, 9 aa, Homo Sapiens
KAMELIREL

SEQ ID NO: 134842 - protein, 9 aa, Homo Sapiens
KAMPLQPSI

SEQ ID NO: 134843 - protein, 9 aa, Homo Sapiens
KANPTTRLW

SEQ ID NO: 134844 - protein, 9 aa, Homo Sapiens
KAQHISRFI

SEQ ID NO: 134845 - protein, 9 aa, Homo Sapiens
KAREKVPKL

SEQ ID NO: 134846 - protein, 9 aa, Homo Sapiens
KARPDLERI

SEQ ID NO: 134847 - protein, 9 aa, Homo Sapiens
KARPFADLL

SEQ ID NO: 134848 - protein, 9 aa, Homo Sapiens
KARPFFNEF

SEQ ID NO: 134849 - protein, 9 aa, Homo Sapiens
KARPNIPVY

SEQ ID NO: 134850 - protein, 9 aa, Homo Sapiens
KATNVVRLL

SEQ ID NO: 134851 - protein, 9 aa, Homo Sapiens
KAVFTDRQL

SEQ ID NO: 134852 - protein, 9 aa, Homo Sapiens
KAVFVARVL

SEQ ID NO: 134853 - protein, 9 aa, Homo Sapiens
KAVSLQRKL

SEQ ID NO: 134854 - protein, 9 aa, Homo Sapiens
KAYKAYRLL

SEQ ID NO: 134855 - protein, 9 aa, Homo Sapiens
KAYSEAHEI

SEQ ID NO: 134856 - protein, 9 aa, Homo Sapiens
KGCPFHRII

SEQ ID NO: 134857 - protein, 9 aa, Homo Sapiens
KGFLFLHTL

SEQ ID NO: 134858 - protein, 9 aa, Homo Sapiens
KGQSTPRLF

SEQ ID NO: 134859 - protein, 9 aa, Homo Sapiens
KGSCFHRII

SEQ ID NO: 134860 - protein, 9 aa, Homo Sapiens
KILEIIRVI

SEQ ID NO: 134861 - protein, 9 aa, Homo Sapiens
KINEKPQVI

SEQ ID NO: 134862 - protein, 9 aa, Homo Sapiens
KIYPLPHMY

SEQ ID NO: 134863 - protein, 9 aa, Homo Sapiens
KLKVSLQTL

SEQ ID NO: 134864 - protein, 9 aa, Homo Sapiens
KSAIPHPLI

SEQ ID NO: 134865 - protein, 9 aa, Homo Sapiens
KSALLERAL

SEQ ID NO: 134866 - protein, 9 aa, Homo Sapiens
KSALVFITF

SEQ ID NO: 134867 - protein, 9 aa, Homo Sapiens
KSALVHRYL

SEQ ID NO: 134868 - protein, 9 aa, Homo Sapiens
KSCDLLLFL

SEQ ID NO: 134869 - protein, 9 aa, Homo Sapiens
KSCEKIHFI

SEQ ID NO: 134870 - protein, 9 aa, Homo Sapiens
KSCGLNPKL

SEQ ID NO: 134871 - protein, 9 aa, Homo Sapiens
KSCMNQVTI

SEQ ID NO: 134872 - protein, 9 aa, Homo Sapiens
KSCVIVLRI

SEQ ID NO: 134873 - protein, 9 aa, Homo Sapiens
KSFADINLY

SEQ ID NO: 134874 - protein, 9 aa, Homo Sapiens
KSFAKARNI

SEQ ID NO: 134875 - protein, 9 aa, Homo Sapiens
KSFDFHFGF

SEQ ID NO: 134876 - protein, 9 aa, Homo Sapiens
KSFDNIRNW

SEQ ID NO: 134877 - protein, 9 aa, Homo Sapiens
KSFEAPATI

SEQ ID NO: 134878 - protein, 9 aa, Homo Sapiens
KSFEGLFYF

SEQ ID NO: 134879 - protein, 9 aa, Homo Sapiens
KSFEKLMKI

SEQ ID NO: 134880 - protein, 9 aa, Homo Sapiens
KSFENISKW

SEQ ID NO: 134881 - protein, 9 aa, Homo Sapiens
KSFFEAKKL

SEQ ID NO: 134882 - protein, 9 aa, Homo Sapiens
KSFFKRKTI

SEQ ID NO: 134883 - protein, 9 aa, Homo Sapiens
KSFGGSHVM

SEQ ID NO: 134884 - protein, 9 aa, Homo Sapiens
KSFINSETI

SEQ ID NO: 134885 - protein, 9 aa, Homo Sapiens
KSFIRKQNL

SEQ ID NO: 134886 - protein, 9 aa, Homo Sapiens
KSFLGVKEL

SEQ ID NO: 134887 - protein, 9 aa, Homo Sapiens
KSFLHKQTL

SEQ ID NO: 134888 - protein, 9 aa, Homo Sapiens
KSFNFDRVF

SEQ ID NO: 134889 - protein, 9 aa, Homo Sapiens
KSFNMQRKL

SEQ ID NO: 134890 - protein, 9 aa, Homo Sapiens
KSFNSVHLL

SEQ ID NO: 134891 - protein, 9 aa, Homo Sapiens
KSFPGGKEY

SEQ ID NO: 134892 - protein, 9 aa, Homo Sapiens
KSFPSIFKF

SEQ ID NO: 134893 - protein, 9 aa, Homo Sapiens
KSFQAIHQF

SEQ ID NO: 134894 - protein, 9 aa, Homo Sapiens
KSFQLQVSL

SEQ ID NO: 134895 - protein, 9 aa, Homo Sapiens
KSFQYSHNL

SEQ ID NO: 134896 - protein, 9 aa, Homo Sapiens
KSFSEDRLI

SEQ ID NO: 134897 - protein, 9 aa, Homo Sapiens
KSFSFVRVI

SEQ ID NO: 134898 - protein, 9 aa, Homo Sapiens
KSFSGSYRL

SEQ ID NO: 134899 - protein, 9 aa, Homo Sapiens
KSFSQKTTL

SEQ ID NO: 134900 - protein, 9 aa, Homo Sapiens
KSFSQQRSL

SEQ ID NO: 134901 - protein, 9 aa, Homo Sapiens
KSFSYKRNL

SEQ ID NO: 134902 - protein, 9 aa, Homo Sapiens
KSFTHSSTF

SEQ ID NO: 134903 - protein, 9 aa, Homo Sapiens
KSFVCAWNL

SEQ ID NO: 134904 - protein, 9 aa, Homo Sapiens
KSFVKPPSL

SEQ ID NO: 134905 - protein, 9 aa, Homo Sapiens
KSFVKVYNY

SEQ ID NO: 134906 - protein, 9 aa, Homo Sapiens
KSFVQKQHL

SEQ ID NO: 134907 - protein, 9 aa, Homo Sapiens
KSFVTKRSL

SEQ ID NO: 134908 - protein, 9 aa, Homo Sapiens
KSFYDARLL

SEQ ID NO: 134909 - protein, 9 aa, Homo Sapiens
KSFYQFQHY

SEQ ID NO: 134910 - protein, 9 aa, Homo Sapiens
KSHIFFWTW

SEQ ID NO: 134911 - protein, 9 aa, Homo Sapiens
KSIAKADLI

SEQ ID NO: 134912 - protein, 9 aa, Homo Sapiens
KSIDCIRAF

SEQ ID NO: 134913 - protein, 9 aa, Homo Sapiens
KSIDLIQKW

SEQ ID NO: 134914 - protein, 9 aa, Homo Sapiens
KSIEERVTI

SEQ ID NO: 134915 - protein, 9 aa, Homo Sapiens
KSIELFYKF

SEQ ID NO: 134916 - protein, 9 aa, Homo Sapiens
KSIHHARVL

SEQ ID NO: 134917 - protein, 9 aa, Homo Sapiens
KSIHIVVTM

SEQ ID NO: 134918 - protein, 9 aa, Homo Sapiens
KSIHLSINF

SEQ ID NO: 134919 - protein, 9 aa, Homo Sapiens
KSIKIAWAL

SEQ ID NO: 134920 - protein, 9 aa, Homo Sapiens
KSIKIVKKL

SEQ ID NO: 134921 - protein, 9 aa, Homo Sapiens
KSIKNIQKI

SEQ ID NO: 134922 - protein, 9 aa, Homo Sapiens
KSIPVTQEL

SEQ ID NO: 134923 - protein, 9 aa, Homo Sapiens
KSIQAAFKF

SEQ ID NO: 134924 - protein, 9 aa, Homo Sapiens
KSITNPRYL

SEQ ID NO: 134925 - protein, 9 aa, Homo Sapiens
KSIVIMVHI

SEQ ID NO: 134926 - protein, 9 aa, Homo Sapiens
KSIVQVETL

SEQ ID NO: 134927 - protein, 9 aa, Homo Sapiens
KSIWNNRWL

SEQ ID NO: 134928 - protein, 9 aa, Homo Sapiens
KSKDFVQVM

SEQ ID NO: 134929 - protein, 9 aa, Homo Sapiens
KSKDVIKTI

SEQ ID NO: 134930 - protein, 9 aa, Homo Sapiens
KSKEFAQII

SEQ ID NO: 134931 - protein, 9 aa, Homo Sapiens
KSKEIEAKI

SEQ ID NO: 134932 - protein, 9 aa, Homo Sapiens
KSKEISQFL

SEQ ID NO: 134933 - protein, 9 aa, Homo Sapiens
KSKGWVNTL

SEQ ID NO: 134934 - protein, 9 aa, Homo Sapiens
KSKILKQVI

SEQ ID NO: 134935 - protein, 9 aa, Homo Sapiens
KSKLDIWNI

SEQ ID NO: 134936 - protein, 9 aa, Homo Sapiens
KSKNILFVI

SEQ ID NO: 134937 - protein, 9 aa, Homo Sapiens
KSKPDKQLI

SEQ ID NO: 134938 - protein, 9 aa, Homo Sapiens
KSKPFCEKL

SEQ ID NO: 134939 - protein, 9 aa, Homo Sapiens
KSKPIFWNL

SEQ ID NO: 134940 - protein, 9 aa, Homo Sapiens
KSKPMTQIL

SEQ ID NO: 134941 - protein, 9 aa, Homo Sapiens
KSKPVPLKL

SEQ ID NO: 134942 - protein, 9 aa, Homo Sapiens
KSKSFFDNI

SEQ ID NO: 134943 - protein, 9 aa, Homo Sapiens
KSKTLQEFL

SEQ ID NO: 134944 - protein, 9 aa, Homo Sapiens
KSKYFESKF

SEQ ID NO: 134945 - protein, 9 aa, Homo Sapiens
KSLAKTFHL

SEQ ID NO: 134946 - protein, 9 aa, Homo Sapiens
KSLCLKLLL

SEQ ID NO: 134947 - protein, 9 aa, Homo Sapiens
KSLDFGFTI

SEQ ID NO: 134948 - protein, 9 aa, Homo Sapiens
KSLEAFFLY

SEQ ID NO: 134949 - protein, 9 aa, Homo Sapiens
KSLEKSELI

SEQ ID NO: 134950 - protein, 9 aa, Homo Sapiens
KSLENAIEW

SEQ ID NO: 134951 - protein, 9 aa, Homo Sapiens
KSLFLGQKL

SEQ ID NO: 134952 - protein, 9 aa, Homo Sapiens
KSLFLIIKI

SEQ ID NO: 134953 - protein, 9 aa, Homo Sapiens
KSLGMERLL

SEQ ID NO: 134954 - protein, 9 aa, Homo Sapiens
KSLITTHHL

SEQ ID NO: 134955 - protein, 9 aa, Homo Sapiens
KSLKILRNM

SEQ ID NO: 134956 - protein, 9 aa, Homo Sapiens
KSLKQNINL

SEQ ID NO: 134957 - protein, 9 aa, Homo Sapiens
KSLLFVNTL

SEQ ID NO: 134958 - protein, 9 aa, Homo Sapiens
KSLLVVHFW

SEQ ID NO: 134959 - protein, 9 aa, Homo Sapiens
KSLLWTETF

SEQ ID NO: 134960 - protein, 9 aa, Homo Sapiens
KSLMIKREL

SEQ ID NO: 134961 - protein, 9 aa, Homo Sapiens
KSLPLVRKI

SEQ ID NO: 134962 - protein, 9 aa, Homo Sapiens
KSLQMIRQL

SEQ ID NO: 134963 - protein, 9 aa, Homo Sapiens
KSLQTLRSF

SEQ ID NO: 134964 - protein, 9 aa, Homo Sapiens
KSLWKSSTI

SEQ ID NO: 134965 - protein, 9 aa, Homo Sapiens
KSMAERAAI

SEQ ID NO: 134966 - protein, 9 aa, Homo Sapiens
KSMDAIRSL

SEQ ID NO: 134967 - protein, 9 aa, Homo Sapiens
KSMFLARVL

SEQ ID NO: 134968 - protein, 9 aa, Homo Sapiens
KSMKVVKLF

SEQ ID NO: 134969 - protein, 9 aa, Homo Sapiens
KSMLFKREL

SEQ ID NO: 134970 - protein, 9 aa, Homo Sapiens
KSMNKSIHI

SEQ ID NO: 134971 - protein, 9 aa, Homo Sapiens
KSMPTVTQI

SEQ ID NO: 134972 - protein, 9 aa, Homo Sapiens
KSMSVERTF

SEQ ID NO: 134973 - protein, 9 aa, Homo Sapiens
KSNPIIRTV

SEQ ID NO: 134974 - protein, 9 aa, Homo Sapiens
KSNPKPLVL

SEQ ID NO: 134975 - protein, 9 aa, Homo Sapiens
KSQEQVHLL

SEQ ID NO: 134976 - protein, 9 aa, Homo Sapiens
KSQIPLSKI

SEQ ID NO: 134977 - protein, 9 aa, Homo Sapiens
KSQVDAQLL

SEQ ID NO: 134978 - protein, 9 aa, Homo Sapiens
KSRDLSLLI

SEQ ID NO: 134979 - protein, 9 aa, Homo Sapiens
KSRDYEREI

SEQ ID NO: 134980 - protein, 9 aa, Homo Sapiens
KSRLFEFSL

SEQ ID NO: 134981 - protein, 9 aa, Homo Sapiens
KSRQELNTI

SEQ ID NO: 134982 - protein, 9 aa, Homo Sapiens
KSRQFLQFF

SEQ ID NO: 134983 - protein, 9 aa, Homo Sapiens
KSRVVLPYL

SEQ ID NO: 134984 - protein, 9 aa, Homo Sapiens
KSSDIAKTF

SEQ ID NO: 134985 - protein, 9 aa, Homo Sapiens
KSSLIHRFL

SEQ ID NO: 134986 - protein, 9 aa, Homo Sapiens
KSSNVVRSF

SEQ ID NO: 134987 - protein, 9 aa, Homo Sapiens
KSSQPKPVI

SEQ ID NO: 134988 - protein, 9 aa, Homo Sapiens
KSSTVLHTF

SEQ ID NO: 134989 - protein, 9 aa, Homo Sapiens
KSTAISLFY

SEQ ID NO: 134990 - protein, 9 aa, Homo Sapiens
KSTDVAKTF

SEQ ID NO: 134991 - protein, 9 aa, Homo Sapiens
KSTEFPRKI

SEQ ID NO: 134992 - protein, 9 aa, Homo Sapiens
KSTSLTFHW

SEQ ID NO: 134993 - protein, 9 aa, Homo Sapiens
KSTTCTRFF

SEQ ID NO: 134994 - protein, 9 aa, Homo Sapiens
KSTTTGHLI

SEQ ID NO: 134995 - protein, 9 aa, Homo Sapiens
KSTVNKWTL

SEQ ID NO: 134996 - protein, 9 aa, Homo Sapiens
KSVFITRKL

SEQ ID NO: 134997 - protein, 9 aa, Homo Sapiens
KSVKIYRLI

SEQ ID NO: 134998 - protein, 9 aa, Homo Sapiens
KSVLVKQTI

SEQ ID NO: 134999 - protein, 9 aa, Homo Sapiens
KSVTAFFKW

SEQ ID NO: 135000 - protein, 9 aa, Homo Sapiens
KSVTAFFTW

SEQ ID NO: 135001 - protein, 9 aa, Homo Sapiens
KSVTLGYLF

SEQ ID NO: 135002 - protein, 9 aa, Homo Sapiens
KSVVSYWNL

SEQ ID NO: 135003 - protein, 9 aa, Homo Sapiens
KSVYWENTL

SEQ ID NO: 135004 - protein, 9 aa, Homo Sapiens
KSYAGEKIL

SEQ ID NO: 135005 - protein, 9 aa, Homo Sapiens
KSYAGYQTL

SEQ ID NO: 135006 - protein, 9 aa, Homo Sapiens
KSYDRNYRL

SEQ ID NO: 135007 - protein, 9 aa, Homo Sapiens
KSYELIRKI

SEQ ID NO: 135008 - protein, 9 aa, Homo Sapiens
KSYKGRQII

SEQ ID NO: 135009 - protein, 9 aa, Homo Sapiens
KSYLRCITF

SEQ ID NO: 135010 - protein, 9 aa, Homo Sapiens
KSYNICFEL

SEQ ID NO: 135011 - protein, 9 aa, Homo Sapiens
KSYNQRVHL

SEQ ID NO: 135012 - protein, 9 aa, Homo Sapiens
KSYPETHII

SEQ ID NO: 135013 - protein, 9 aa, Homo Sapiens
KSYQSFQTF

SEQ ID NO: 135014 - protein, 9 aa, Homo Sapiens
KSYSKAFTL

SEQ ID NO: 135015 - protein, 9 aa, Homo Sapiens
KSYVKYQVI

SEQ ID NO: 135016 - protein, 9 aa, Homo Sapiens
KSYVQGVTW

SEQ ID NO: 135017 - protein, 9 aa, Homo Sapiens
KSYYHVYKL

SEQ ID NO: 135018 - protein, 9 aa, Homo Sapiens
KSYYLRNTF

SEQ ID NO: 135019 - protein, 9 aa, Homo Sapiens
KSYYTVHLL

SEQ ID NO: 135020 - protein, 9 aa, Homo Sapiens
KSYYTVRQL

SEQ ID NO: 135021 - protein, 9 aa, Homo Sapiens
KTADVTKVW

SEQ ID NO: 135022 - protein, 9 aa, Homo Sapiens
KTAVVVGTI

SEQ ID NO: 135023 - protein, 9 aa, Homo Sapiens
KTFAEARLI

SEQ ID NO: 135024 - protein, 9 aa, Homo Sapiens
KTFHPVPNL

SEQ ID NO: 135025 - protein, 9 aa, Homo Sapiens
KTFPFHFMF

SEQ ID NO: 135026 - protein, 9 aa, Homo Sapiens
KTFPYQHRY

SEQ ID NO: 135027 - protein, 9 aa, Homo Sapiens
KTFRIKRFL

SEQ ID NO: 135028 - protein, 9 aa, Homo Sapiens
KTFTGHREW

SEQ ID NO: 135029 - protein, 9 aa, Homo Sapiens
KTFTIKRFL

SEQ ID NO: 135030 - protein, 9 aa, Homo Sapiens
KTFTTQETI

SEQ ID NO: 135031 - protein, 9 aa, Homo Sapiens
KTFVHTVHL

SEQ ID NO: 135032 - protein, 9 aa, Homo Sapiens
KTFVQKQTL

SEQ ID NO: 135033 - protein, 9 aa, Homo Sapiens
KTFVQKSTL

SEQ ID NO: 135034 - protein, 9 aa, Homo Sapiens
KTIDNQRVY

SEQ ID NO: 135035 - protein, 9 aa, Homo Sapiens
KTIEDVREF

SEQ ID NO: 135036 - protein, 9 aa, Homo Sapiens
KTIHKYVHL

SEQ ID NO: 135037 - protein, 9 aa, Homo Sapiens
KTIKLWNTL

SEQ ID NO: 135038 - protein, 9 aa, Homo Sapiens
KTIKSLRVL

SEQ ID NO: 135039 - protein, 9 aa, Homo Sapiens
KTIMLKRIY

SEQ ID NO: 135040 - protein, 9 aa, Homo Sapiens
KTKALQTVI

SEQ ID NO: 135041 - protein, 9 aa, Homo Sapiens
KTKDIVNGL

SEQ ID NO: 135042 - protein, 9 aa, Homo Sapiens
KTKEIEQVY

SEQ ID NO: 135043 - protein, 9 aa, Homo Sapiens
KTKETIQVL

SEQ ID NO: 135044 - protein, 9 aa, Homo Sapiens
KTKEVIQEW

SEQ ID NO: 135045 - protein, 9 aa, Homo Sapiens
KTKFEQHTI

SEQ ID NO: 135046 - protein, 9 aa, Homo Sapiens
KTKGFDYLL

SEQ ID NO: 135047 - protein, 9 aa, Homo Sapiens
KTKGFEVYL

SEQ ID NO: 135048 - protein, 9 aa, Homo Sapiens
KTKGFHTTI

SEQ ID NO: 135049 - protein, 9 aa, Homo Sapiens
KTKPFQLQL

SEQ ID NO: 135050 - protein, 9 aa, Homo Sapiens
KTKPHLFYI

SEQ ID NO: 135051 - protein, 9 aa, Homo Sapiens
KTKPIHTII

SEQ ID NO: 135052 - protein, 9 aa, Homo Sapiens
KTKPLTPSI

SEQ ID NO: 135053 - protein, 9 aa, Homo Sapiens
KTKQVIQGL

SEQ ID NO: 135054 - protein, 9 aa, Homo Sapiens
KTKSFFDNI

SEQ ID NO: 135055 - protein, 9 aa, Homo Sapiens
KTLDQIRTI

SEQ ID NO: 135056 - protein, 9 aa, Homo Sapiens
KTLELPHVF

SEQ ID NO: 135057 - protein, 9 aa, Homo Sapiens
KTLERSYLL

SEQ ID NO: 135058 - protein, 9 aa, Homo Sapiens
KTLFILRGL

SEQ ID NO: 135059 - protein, 9 aa, Homo Sapiens
KTLKEIRTL

SEQ ID NO: 135060 - protein, 9 aa, Homo Sapiens
KTLLFVRLL

SEQ ID NO: 135061 - protein, 9 aa, Homo Sapiens
KTLQEVHFL

SEQ ID NO: 135062 - protein, 9 aa, Homo Sapiens
KTMHNLRLL

SEQ ID NO: 135063 - protein, 9 aa, Homo Sapiens
KTNILLRYL

SEQ ID NO: 135064 - protein, 9 aa, Homo Sapiens
KTNPKIQSI

SEQ ID NO: 135065 - protein, 9 aa, Homo Sapiens
KTNQLQRII

SEQ ID NO: 135066 - protein, 9 aa, Homo Sapiens
KTQGPRALW

SEQ ID NO: 135067 - protein, 9 aa, Homo Sapiens
KTRHLALNL

SEQ ID NO: 135068 - protein, 9 aa, Homo Sapiens
KTRHVNILL

SEQ ID NO: 135069 - protein, 9 aa, Homo Sapiens
KTRLINQVL

SEQ ID NO: 135070 - protein, 9 aa, Homo Sapiens
KTRMEERRL

SEQ ID NO: 135071 - protein, 9 aa, Homo Sapiens
KTRQIISTI

SEQ ID NO: 135072 - protein, 9 aa, Homo Sapiens
KTRSVEQTL

SEQ ID NO: 135073 - protein, 9 aa, Homo Sapiens
KTRTNVPTF

SEQ ID NO: 135074 - protein, 9 aa, Homo Sapiens
KTRYIFDLF

SEQ ID NO: 135075 - protein, 9 aa, Homo Sapiens
KTTFVKRHL

SEQ ID NO: 135076 - protein, 9 aa, Homo Sapiens
KTVAIHTLW

SEQ ID NO: 135077 - protein, 9 aa, Homo Sapiens
KTVPQKVTI

SEQ ID NO: 135078 - protein, 9 aa, Homo Sapiens
KTWHKGTLI

SEQ ID NO: 135079 - protein, 9 aa, Homo Sapiens
KTYFKAAKL

SEQ ID NO: 135080 - protein, 9 aa, Homo Sapiens
KTYPLGRIL

SEQ ID NO: 135081 - protein, 9 aa, Homo Sapiens
KTYSLLHQW

SEQ ID NO: 135082 - protein, 9 aa, Homo Sapiens
KVAEVTKKF

SEQ ID NO: 135083 - protein, 9 aa, Homo Sapiens
KVCKIHRML

SEQ ID NO: 135084 - protein, 9 aa, Homo Sapiens
KVFNKKRLL

SEQ ID NO: 135085 - protein, 9 aa, Homo Sapiens
KVFNQKRYL

SEQ ID NO: 135086 - protein, 9 aa, Homo Sapiens
KVIKIAWAL

SEQ ID NO: 135087 - protein, 9 aa, Homo Sapiens
KVINAAHSF

SEQ ID NO: 135088 - protein, 9 aa, Homo Sapiens
KVIPVTRSL

SEQ ID NO: 135089 - protein, 9 aa, Homo Sapiens
KVKEFCENL

SEQ ID NO: 135090 - protein, 9 aa, Homo Sapiens
KVKELAETI

SEQ ID NO: 135091 - protein, 9 aa, Homo Sapiens
KVKPNLQTF

SEQ ID NO: 135092 - protein, 9 aa, Homo Sapiens
KVKQFDFLF

SEQ ID NO: 135093 - protein, 9 aa, Homo Sapiens
KVKTDTVLI

SEQ ID NO: 135094 - protein, 9 aa, Homo Sapiens
KVLELQRKL

SEQ ID NO: 135095 - protein, 9 aa, Homo Sapiens
KVNKIVRTL

SEQ ID NO: 135096 - protein, 9 aa, Homo Sapiens
KVQEFQRLL

SEQ ID NO: 135097 - protein, 9 aa, Homo Sapiens
KVTELLRTF

SEQ ID NO: 135098 - protein, 9 aa, Homo Sapiens
KVTTVKKFF

SEQ ID NO: 135099 - protein, 9 aa, Homo Sapiens
KVVDVVRNL

SEQ ID NO: 135100 - protein, 9 aa, Homo Sapiens
LACPLLRQL

SEQ ID NO: 135101 - protein, 9 aa, Homo Sapiens
LARAILRKN

SEQ ID NO: 135102 - protein, 9 aa, Homo Sapiens
LSCTLNRYL

SEQ ID NO: 135103 - protein, 9 aa, Homo Sapiens
LSFFMARVF

SEQ ID NO: 135104 - protein, 9 aa, Homo Sapiens
LSFHQGCTI

SEQ ID NO: 135105 - protein, 9 aa, Homo Sapiens
LSGAIVSLS

SEQ ID NO: 135106 - protein, 9 aa, Homo Sapiens
LSIHLQHKF

SEQ ID NO: 135107 - protein, 9 aa, Homo Sapiens
LSKPFTNTL

SEQ ID NO: 135108 - protein, 9 aa, Homo Sapiens
LSKPNPPSL

SEQ ID NO: 135109 - protein, 9 aa, Homo Sapiens
LSLKVLRKL

SEQ ID NO: 135110 - protein, 9 aa, Homo Sapiens
LSLPLNREL

SEQ ID NO: 135111 - protein, 9 aa, Homo Sapiens
LSLTLLHLL

SEQ ID NO: 135112 - protein, 9 aa, Homo Sapiens
LSMIIIRTL

SEQ ID NO: 135113 - protein, 9 aa, Homo Sapiens
LSNAQARVI

SEQ ID NO: 135114 - protein, 9 aa, Homo Sapiens
LSNKTPRSL

SEQ ID NO: 135115 - protein, 9 aa, Homo Sapiens
LSNPDPRLL

SEQ ID NO: 135116 - protein, 9 aa, Homo Sapiens
LSQPILLEL

SEQ ID NO: 135117 - protein, 9 aa, Homo Sapiens
LSQPTPATL

SEQ ID NO: 135118 - protein, 9 aa, Homo Sapiens
LSSPVQRTL

SEQ ID NO: 135119 - protein, 9 aa, Homo Sapiens
LSSSVIREL

SEQ ID NO: 135120 - protein, 9 aa, Homo Sapiens
LSTTVKREL

SEQ ID NO: 135121 - protein, 9 aa, Homo Sapiens
LTIPVQRLL

SEQ ID NO: 135122 - protein, 9 aa, Homo Sapiens
LTKISFHLK

SEQ ID NO: 135123 - protein, 9 aa, Homo Sapiens
LTKKIKQCL

SEQ ID NO: 135124 - protein, 9 aa, Homo Sapiens
LTKQEFQTL

SEQ ID NO: 135125 - protein, 9 aa, Homo Sapiens
LTLKSHRLL

SEQ ID NO: 135126 - protein, 9 aa, Homo Sapiens
LTNGSGRYI

SEQ ID NO: 135127 - protein, 9 aa, Homo Sapiens
LTYASPPLI

SEQ ID NO: 135128 - protein, 9 aa, Homo Sapiens
LTYQLCHTY

SEQ ID NO: 135129 - protein, 9 aa, Homo Sapiens
LVNICLNVL

SEQ ID NO: 135130 - protein, 9 aa, Homo Sapiens
MAAGTPILR

SEQ ID NO: 135131 - protein, 9 aa, Homo Sapiens
MARKINFLM

SEQ ID NO: 135132 - protein, 9 aa, Homo Sapiens
MSNKACRYF

SEQ ID NO: 135133 - protein, 9 aa, Homo Sapiens
MSYEEKRQL

SEQ ID NO: 135134 - protein, 9 aa, Homo Sapiens
MTYKHPHVL

SEQ ID NO: 135135 - protein, 9 aa, Homo Sapiens
PSSNKPRVI

SEQ ID NO: 135136 - protein, 9 aa, Homo Sapiens
QATQAARKL

SEQ ID NO: 135137 - protein, 9 aa, Homo Sapiens
QSFTGSRTY

SEQ ID NO: 135138 - protein, 9 aa, Homo Sapiens
QSIRIQRML

SEQ ID NO: 135139 - protein, 9 aa, Homo Sapiens
QSLQIFRKW

SEQ ID NO: 135140 - protein, 9 aa, Homo Sapiens
QSLRFEHKL

SEQ ID NO: 135141 - protein, 9 aa, Homo Sapiens
QSLRLVRKL

SEQ ID NO: 135142 - protein, 9 aa, Homo Sapiens
QSMKIMHEI

SEQ ID NO: 135143 - protein, 9 aa, Homo Sapiens
QSTDIIRYL

SEQ ID NO: 135144 - protein, 9 aa, Homo Sapiens
QTSKTQRLL

SEQ ID NO: 135145 - protein, 9 aa, Homo Sapiens
RAADIRRKL

SEQ ID NO: 135146 - protein, 9 aa, Homo Sapiens
RAAQLQRKF

SEQ ID NO: 135147 - protein, 9 aa, Homo Sapiens
RAAVVIRTL

SEQ ID NO: 135148 - protein, 9 aa, Homo Sapiens
RAIDKCWKI

SEQ ID NO: 135149 - protein, 9 aa, Homo Sapiens
RAKATRISI

SEQ ID NO: 135150 - protein, 9 aa, Homo Sapiens
RAKTVVLHI

SEQ ID NO: 135151 - protein, 9 aa, Homo Sapiens
RALELTRRL

SEQ ID NO: 135152 - protein, 9 aa, Homo Sapiens
RALKEIRKF

SEQ ID NO: 135153 - protein, 9 aa, Homo Sapiens
RALPHHRVI

SEQ ID NO: 135154 - protein, 9 aa, Homo Sapiens
RALSIQRLW

SEQ ID NO: 135155 - protein, 9 aa, Homo Sapiens
RANVNARTF

SEQ ID NO: 135156 - protein, 9 aa, Homo Sapiens
RAREYNARL

SEQ ID NO: 135157 - protein, 9 aa, Homo Sapiens
RARQLNYTI

SEQ ID NO: 135158 - protein, 9 aa, Homo Sapiens
RARTIYERF

SEQ ID NO: 135159 - protein, 9 aa, Homo Sapiens
RAWQERRLL

SEQ ID NO: 135160 - protein, 9 aa, Homo Sapiens
RAYPAAITI

SEQ ID NO: 135161 - protein, 9 aa, Homo Sapiens
RIHFPLATY

SEQ ID NO: 135162 - protein, 9 aa, Homo Sapiens
RIHVCLYFI

SEQ ID NO: 135163 - protein, 9 aa, Homo Sapiens
RLYPGQRHL

SEQ ID NO: 135164 - protein, 9 aa, Homo Sapiens
RSALVNNTI

SEQ ID NO: 135165 - protein, 9 aa, Homo Sapiens
RSAPVYKRI

SEQ ID NO: 135166 - protein, 9 aa, Homo Sapiens
RSFFHQHYL

SEQ ID NO: 135167 - protein, 9 aa, Homo Sapiens
RSFHEVREF

SEQ ID NO: 135168 - protein, 9 aa, Homo Sapiens
RSFHRTQDL

SEQ ID NO: 135169 - protein, 9 aa, Homo Sapiens
RSFLKSCHF

SEQ ID NO: 135170 - protein, 9 aa, Homo Sapiens
RSFPSVREL

SEQ ID NO: 135171 - protein, 9 aa, Homo Sapiens
RSFQGPVLI

SEQ ID NO: 135172 - protein, 9 aa, Homo Sapiens
RSFQMQYNL

SEQ ID NO: 135173 - protein, 9 aa, Homo Sapiens
RSHVVQRVL

SEQ ID NO: 135174 - protein, 9 aa, Homo Sapiens
RSIDLNRLI

SEQ ID NO: 135175 - protein, 9 aa, Homo Sapiens
RSIDLTVKL

SEQ ID NO: 135176 - protein, 9 aa, Homo Sapiens
RSIHIFDTL

SEQ ID NO: 135177 - protein, 9 aa, Homo Sapiens
RSIIFANYI

SEQ ID NO: 135178 - protein, 9 aa, Homo Sapiens
RSIILNHVI

SEQ ID NO: 135179 - protein, 9 aa, Homo Sapiens
RSINKLIRI

SEQ ID NO: 135180 - protein, 9 aa, Homo Sapiens
RSIPTHREI

SEQ ID NO: 135181 - protein, 9 aa, Homo Sapiens
RSIPVWIKI

SEQ ID NO: 135182 - protein, 9 aa, Homo Sapiens
RSIQQGFCF

SEQ ID NO: 135183 - protein, 9 aa, Homo Sapiens
RSIRLPETI

SEQ ID NO: 135184 - protein, 9 aa, Homo Sapiens
RSITLHHRI

SEQ ID NO: 135185 - protein, 9 aa, Homo Sapiens
RSKAIRYTW

SEQ ID NO: 135186 - protein, 9 aa, Homo Sapiens
RSKDTCIVI

SEQ ID NO: 135187 - protein, 9 aa, Homo Sapiens
RSKDTDALI

SEQ ID NO: 135188 - protein, 9 aa, Homo Sapiens
RSKKLSVLI

SEQ ID NO: 135189 - protein, 9 aa, Homo Sapiens
RSKPLFHHF

SEQ ID NO: 135190 - protein, 9 aa, Homo Sapiens
RSKQEFQFF

SEQ ID NO: 135191 - protein, 9 aa, Homo Sapiens
RSLAYIHSF

SEQ ID NO: 135192 - protein, 9 aa, Homo Sapiens
RSLEGGFKI

SEQ ID NO: 135193 - protein, 9 aa, Homo Sapiens
RSLFIDRTI

SEQ ID NO: 135194 - protein, 9 aa, Homo Sapiens
RSLFLGRIL

SEQ ID NO: 135195 - protein, 9 aa, Homo Sapiens
RSLGFNTQI

SEQ ID NO: 135196 - protein, 9 aa, Homo Sapiens
RSLGGTRLF

SEQ ID NO: 135197 - protein, 9 aa, Homo Sapiens
RSLHLEASL

SEQ ID NO: 135198 - protein, 9 aa, Homo Sapiens
RSLHLQKSL

SEQ ID NO: 135199 - protein, 9 aa, Homo Sapiens
RSLKLAYTL

SEQ ID NO: 135200 - protein, 9 aa, Homo Sapiens
RSLKVWRTL

SEQ ID NO: 135201 - protein, 9 aa, Homo Sapiens
RSLLADRLL

SEQ ID NO: 135202 - protein, 9 aa, Homo Sapiens
RSLLLQKKL

SEQ ID NO: 135203 - protein, 9 aa, Homo Sapiens
RSLLQENNW

SEQ ID NO: 135204 - protein, 9 aa, Homo Sapiens
RSLLVNRSL

SEQ ID NO: 135205 - protein, 9 aa, Homo Sapiens
RSLNPPLTI

SEQ ID NO: 135206 - protein, 9 aa, Homo Sapiens
RSLPEIWTL

SEQ ID NO: 135207 - protein, 9 aa, Homo Sapiens
RSLQTICSW

SEQ ID NO: 135208 - protein, 9 aa, Homo Sapiens
RSLSTTNVF

SEQ ID NO: 135209 - protein, 9 aa, Homo Sapiens
RSLTHPPTI

SEQ ID NO: 135210 - protein, 9 aa, Homo Sapiens
RSLWKDVTF

SEQ ID NO: 135211 - protein, 9 aa, Homo Sapiens
RSMVFARHL

SEQ ID NO: 135212 - protein, 9 aa, Homo Sapiens
RSNPSVFVI

SEQ ID NO: 135213 - protein, 9 aa, Homo Sapiens
RSQEKCYLF

SEQ ID NO: 135214 - protein, 9 aa, Homo Sapiens
RSRATIFEI

SEQ ID NO: 135215 - protein, 9 aa, Homo Sapiens
RSRDTCIVI

SEQ ID NO: 135216 - protein, 9 aa, Homo Sapiens
RSRDYQPLL

SEQ ID NO: 135217 - protein, 9 aa, Homo Sapiens
RSREFLDFL

SEQ ID NO: 135218 - protein, 9 aa, Homo Sapiens
RSRIPMETL

SEQ ID NO: 135219 - protein, 9 aa, Homo Sapiens
RSRPEYFRI

SEQ ID NO: 135220 - protein, 9 aa, Homo Sapiens
RSRPHTRLF

SEQ ID NO: 135221 - protein, 9 aa, Homo Sapiens
RSRSFDYNY

SEQ ID NO: 135222 - protein, 9 aa, Homo Sapiens
RSRSLAPVL

SEQ ID NO: 135223 - protein, 9 aa, Homo Sapiens
RSRTIVHTL

SEQ ID NO: 135224 - protein, 9 aa, Homo Sapiens
RSSQFARKL

SEQ ID NO: 135225 - protein, 9 aa, Homo Sapiens
RSTDSIRLL

SEQ ID NO: 135226 - protein, 9 aa, Homo Sapiens
RSTQLIRHL

SEQ ID NO: 135227 - protein, 9 aa, Homo Sapiens
RSWGGCRSL

SEQ ID NO: 135228 - protein, 9 aa, Homo Sapiens
RSYPHLRRV

SEQ ID NO: 135229 - protein, 9 aa, Homo Sapiens
RSYSRLETL

SEQ ID NO: 135230 - protein, 9 aa, Homo Sapiens
RSYTLIRKL

SEQ ID NO: 135231 - protein, 9 aa, Homo Sapiens
RSYWKEVLL

SEQ ID NO: 135232 - protein, 9 aa, Homo Sapiens
RTCTLLREM

SEQ ID NO: 135233 - protein, 9 aa, Homo Sapiens
RTFHIFYYL

SEQ ID NO: 135234 - protein, 9 aa, Homo Sapiens
RTFLHTVCF

SEQ ID NO: 135235 - protein, 9 aa, Homo Sapiens
RTFLLTYVL

SEQ ID NO: 135236 - protein, 9 aa, Homo Sapiens
RTFPDPTSW

SEQ ID NO: 135237 - protein, 9 aa, Homo Sapiens
RTFTLKHSL

SEQ ID NO: 135238 - protein, 9 aa, Homo Sapiens
RTIGFFYTL

SEQ ID NO: 135239 - protein, 9 aa, Homo Sapiens
RTIREVRTL

SEQ ID NO: 135240 - protein, 9 aa, Homo Sapiens
RTIVIRRDY

SEQ ID NO: 135241 - protein, 9 aa, Homo Sapiens
RTIVLQESI

SEQ ID NO: 135242 - protein, 9 aa, Homo Sapiens
RTKQVLHTF

SEQ ID NO: 135243 - protein, 9 aa, Homo Sapiens
RTLAEARRL

SEQ ID NO: 135244 - protein, 9 aa, Homo Sapiens
RTLAIARNL

SEQ ID NO: 135245 - protein, 9 aa, Homo Sapiens
RTLAVERLL

SEQ ID NO: 135246 - protein, 9 aa, Homo Sapiens
RTLEQARQL

SEQ ID NO: 135247 - protein, 9 aa, Homo Sapiens
RTLHHNWRY

SEQ ID NO: 135248 - protein, 9 aa, Homo Sapiens
RTLPTPRTL

SEQ ID NO: 135249 - protein, 9 aa, Homo Sapiens
RTMEWVQTI

SEQ ID NO: 135250 - protein, 9 aa, Homo Sapiens
RTTEILHHL

SEQ ID NO: 135251 - protein, 9 aa, Homo Sapiens
RTTNLIRHF

SEQ ID NO: 135252 - protein, 9 aa, Homo Sapiens
RTTVVARKL

SEQ ID NO: 135253 - protein, 9 aa, Homo Sapiens
RTTYIKRVI

SEQ ID NO: 135254 - protein, 9 aa, Homo Sapiens
RTVEKPPKF

SEQ ID NO: 135255 - protein, 9 aa, Homo Sapiens
RTVEKTWKL

SEQ ID NO: 135256 - protein, 9 aa, Homo Sapiens
RTVQSFRHL

SEQ ID NO: 135257 - protein, 9 aa, Homo Sapiens
RTVRIWRQY

SEQ ID NO: 135258 - protein, 9 aa, Homo Sapiens
RTVVRTVTL

SEQ ID NO: 135259 - protein, 9 aa, Homo Sapiens
RTWAERRQF

SEQ ID NO: 135260 - protein, 9 aa, Homo Sapiens
RTYRELRLL

SEQ ID NO: 135261 - protein, 9 aa, Homo Sapiens
RVCEILRRL

SEQ ID NO: 135262 - protein, 9 aa, Homo Sapiens
RVIDLLRVI

SEQ ID NO: 135263 - protein, 9 aa, Homo Sapiens
RVQKIRPSI

SEQ ID NO: 135264 - protein, 9 aa, Homo Sapiens
RVQKLSRVI

SEQ ID NO: 135265 - protein, 9 aa, Homo Sapiens
RVSDILRYL

SEQ ID NO: 135266 - protein, 9 aa, Homo Sapiens
RVWSLMRFL

SEQ ID NO: 135267 - protein, 9 aa, Homo Sapiens
RVYDVTRFL

SEQ ID NO: 135268 - protein, 9 aa, Homo Sapiens
RVYEILRLL

SEQ ID NO: 135269 - protein, 9 aa, Homo Sapiens
RYTRHLVSL

SEQ ID NO: 135270 - protein, 9 aa, Homo Sapiens
SAFLPARFY

SEQ ID NO: 135271 - protein, 9 aa, Homo Sapiens
SAVQAARKL

SEQ ID NO: 135272 - protein, 9 aa, Homo Sapiens
SIPLALALS

SEQ ID NO: 135273 - protein, 9 aa, Homo Sapiens
SNPHGCRLF

SEQ ID NO: 135274 - protein, 9 aa, Homo Sapiens
SSCPLLRTL

SEQ ID NO: 135275 - protein, 9 aa, Homo Sapiens
SSIKIVRHI

SEQ ID NO: 135276 - protein, 9 aa, Homo Sapiens
STTDVEKSF

SEQ ID NO: 135277 - protein, 9 aa, Homo Sapiens
SYLDKVQAL

SEQ ID NO: 135278 - protein, 9 aa, Homo Sapiens
TSFCAKYTY

SEQ ID NO: 135279 - protein, 9 aa, Homo Sapiens
TSKPFNPLL

SEQ ID NO: 135280 - protein, 9 aa, Homo Sapiens
TSLFIARSF

SEQ ID NO: 135281 - protein, 9 aa, Homo Sapiens
TSRHLEETI

SEQ ID NO: 135282 - protein, 9 aa, Homo Sapiens
VAPGKDLTK

SEQ ID NO: 135283 - protein, 9 aa, Homo Sapiens
VSCNIFRTL

SEQ ID NO: 135284 - protein, 9 aa, Homo Sapiens
VSFLEYRTF

SEQ ID NO: 135285 - protein, 9 aa, Homo Sapiens
VSFQHPHKY

SEQ ID NO: 135286 - protein, 9 aa, Homo Sapiens
VSKPLAHHI

SEQ ID NO: 135287 - protein, 9 aa, Homo Sapiens
VSLDICRYL

SEQ ID NO: 135288 - protein, 9 aa, Homo Sapiens
VSLLVQRTI

SEQ ID NO: 135289 - protein, 9 aa, Homo Sapiens
VSNPATRML

SEQ ID NO: 135290 - protein, 9 aa, Homo Sapiens
VSNPKSFEY

SEQ ID NO: 135291 - protein, 9 aa, Homo Sapiens
VSNPYHVVI

SEQ ID NO: 135292 - protein, 9 aa, Homo Sapiens
VSQEVTRSL

SEQ ID NO: 135293 - protein, 9 aa, Homo Sapiens
VSSKVQRLL

SEQ ID NO: 135294 - protein, 9 aa, Homo Sapiens
VSVPVVWTL

SEQ ID NO: 135295 - protein, 9 aa, Homo Sapiens
VTFSGQYNI

SEQ ID NO: 135296 - protein, 9 aa, Homo Sapiens
VTIRLLETI

SEQ ID NO: 135297 - protein, 9 aa, Homo Sapiens
VTNPYQATI

SEQ ID NO: 135298 - protein, 9 aa, Homo Sapiens
VTYKNVPNW

SEQ ID NO: 135299 - protein, 9 aa, Homo Sapiens
VTYVPVTTF

SEQ ID NO: 135300 - protein, 9 aa, Homo Sapiens
VVNQIARQL

SEQ ID NO: 135301 - protein, 9 aa, Homo Sapiens
YAIRGVPSL

SEQ ID NO: 135302 - protein, 9 aa, Homo Sapiens
YAKRIQQRL

SEQ ID NO: 135303 - protein, 9 aa, Homo Sapiens
YSFRNVQQI

SEQ ID NO: 135304 - protein, 9 aa, Homo Sapiens
YSKRIAVAL

SEQ ID NO: 135305 - protein, 9 aa, Homo Sapiens
YSRRFFPYY

SEQ ID NO: 135306 - protein, 9 aa, Homo Sapiens
YTLRILRQL

SEQ ID NO: 135307 - protein, 9 aa, Homo Sapiens
YTVKVQREL

SEQ ID NO: 135308 - protein, 9 aa, Homo Sapiens
YTYRGPKAF

SEQ ID NO: 135309 - protein, 10 aa, Homo Sapiens
ASELHSVRKL

SEQ ID NO: 135310 - protein, 10 aa, Homo Sapiens
ASLGASVHKI

SEQ ID NO: 135311 - protein, 10 aa, Homo Sapiens
EENLLDFVRF

SEQ ID NO: 135312 - protein, 10 aa, Homo Sapiens
EESNYELEGK

SEQ ID NO: 135313 - protein, 10 aa, Homo Sapiens
FTIKADVWSF

SEQ ID NO: 135314 - protein, 10 aa, Homo Sapiens
FTIKSDVWSF

SEQ ID NO: 135315 - protein, 10 aa, Homo Sapiens
GASSLSGRCW

SEQ ID NO: 135316 - protein, 10 aa, Homo Sapiens
GGASLGARHI

SEQ ID NO: 135317 - protein, 10 aa, Homo Sapiens
GNSSIVGRLL

SEQ ID NO: 135318 - protein, 10 aa, Homo Sapiens
GPSSNKPRVI

SEQ ID NO: 135319 - protein, 10 aa, Homo Sapiens
HSITSDNHKW

SEQ ID NO: 135320 - protein, 10 aa, Homo Sapiens
HSKDGSLQQL

SEQ ID NO: 135321 - protein, 10 aa, Homo Sapiens
HTIQTEDRVW

SEQ ID NO: 135322 - protein, 10 aa, Homo Sapiens
IRLENEIQTY

SEQ ID NO: 135323 - protein, 10 aa, Homo Sapiens
ISMPDFDLHL

SEQ ID NO: 135324 - protein, 10 aa, Homo Sapiens
ISNPHGCRLF

SEQ ID NO: 135325 - protein, 10 aa, Homo Sapiens
KAAPGWLKRF

SEQ ID NO: 135326 - protein, 10 aa, Homo Sapiens
KAINGKYHRF

SEQ ID NO: 135327 - protein, 10 aa, Homo Sapiens
KAIPDTRLTI

SEQ ID NO: 135328 - protein, 10 aa, Homo Sapiens
KGGTSIIMEL

SEQ ID NO: 135329 - protein, 10 aa, Homo Sapiens
KMIPPGIHFL

SEQ ID NO: 135330 - protein, 10 aa, Homo Sapiens
KSADPEVMLL

SEQ ID NO: 135331 - protein, 10 aa, Homo Sapiens
KSANSTLRLL

SEQ ID NO: 135332 - protein, 10 aa, Homo Sapiens
KSDPSIVRLL

SEQ ID NO: 135333 - protein, 10 aa, Homo Sapiens
KSFEGLFYFL

SEQ ID NO: 135334 - protein, 10 aa, Homo Sapiens
KSFPGGKEYL

SEQ ID NO: 135335 - protein, 10 aa, Homo Sapiens
KSFRDKGIFL

SEQ ID NO: 135336 - protein, 10 aa, Homo Sapiens
KSGEAKYFHL

SEQ ID NO: 135337 - protein, 10 aa, Homo Sapiens
KSIELGTLTI

SEQ ID NO: 135338 - protein, 10 aa, Homo Sapiens
KSINSEVLKF

SEQ ID NO: 135339 - protein, 10 aa, Homo Sapiens
KSKDPSGLLI

SEQ ID NO: 135340 - protein, 10 aa, Homo Sapiens
KSKEALIQCL

SEQ ID NO: 135341 - protein, 10 aa, Homo Sapiens
KSKPDKALSL

SEQ ID NO: 135342 - protein, 10 aa, Homo Sapiens
KSLPAEINRM

SEQ ID NO: 135343 - protein, 10 aa, Homo Sapiens
KSLPASLSFL

SEQ ID NO: 135344 - protein, 10 aa, Homo Sapiens
KSQHGSARLF

SEQ ID NO: 135345 - protein, 10 aa, Homo Sapiens
KSVFIKQQRF

SEQ ID NO: 135346 - protein, 10 aa, Homo Sapiens
KSVGKIEHSF

SEQ ID NO: 135347 - protein, 10 aa, Homo Sapiens
KSVVGNLHRL

SEQ ID NO: 135348 - protein, 10 aa, Homo Sapiens
KSYDGRAYVI

SEQ ID NO: 135349 - protein, 10 aa, Homo Sapiens
KSYEAKLRLL

SEQ ID NO: 135350 - protein, 10 aa, Homo Sapiens
KSYGNEKRFF

SEQ ID NO: 135351 - protein, 10 aa, Homo Sapiens
KTIDGILLLI

SEQ ID NO: 135352 - protein, 10 aa, Homo Sapiens
KTIHLTGRSL

SEQ ID NO: 135353 - protein, 10 aa, Homo Sapiens
KTKAIQAQKL

SEQ ID NO: 135354 - protein, 10 aa, Homo Sapiens
KTKDFQESSI

SEQ ID NO: 135355 - protein, 10 aa, Homo Sapiens
KTKDGVREVF

SEQ ID NO: 135356 - protein, 10 aa, Homo Sapiens
KTKEGVREVF

SEQ ID NO: 135357 - protein, 10 aa, Homo Sapiens
KTKENILEEF

SEQ ID NO: 135358 - protein, 10 aa, Homo Sapiens
KTLDQAIMKF

SEQ ID NO: 135359 - protein, 10 aa, Homo Sapiens
KTLDSQTRTF

SEQ ID NO: 135360 - protein, 10 aa, Homo Sapiens
KTLTGKTITL

SEQ ID NO: 135361 - protein, 10 aa, Homo Sapiens
KTNPDDRRII

SEQ ID NO: 135362 - protein, 10 aa, Homo Sapiens
KTPEEIRKTF

SEQ ID NO: 135363 - protein, 10 aa, Homo Sapiens
KTYGEIFEKF

SEQ ID NO: 135364 - protein, 10 aa, Homo Sapiens
KTYQDIQNTI

SEQ ID NO: 135365 - protein, 10 aa, Homo Sapiens
LSADFNYRSF

SEQ ID NO: 135366 - protein, 10 aa, Homo Sapiens
LSISPIVLYL

SEQ ID NO: 135367 - protein, 10 aa, Homo Sapiens
LSLAPDGRTF

SEQ ID NO: 135368 - protein, 10 aa, Homo Sapiens
LSLPDIKVYL

SEQ ID NO: 135369 - protein, 10 aa, Homo Sapiens
LSVPDSGRLW

SEQ ID NO: 135370 - protein, 10 aa, Homo Sapiens
MRLEKEIETY

SEQ ID NO: 135371 - protein, 10 aa, Homo Sapiens
NDMRQEYEQL

SEQ ID NO: 135372 - protein, 10 aa, Homo Sapiens
QAINPKLLQL

SEQ ID NO: 135373 - protein, 10 aa, Homo Sapiens
QAINPKLMQL

SEQ ID NO: 135374 - protein, 10 aa, Homo Sapiens
QSLEASLHAM

SEQ ID NO: 135375 - protein, 10 aa, Homo Sapiens
RAAPPPLFLL

SEQ ID NO: 135376 - protein, 10 aa, Homo Sapiens
RAYPHNLMTF

SEQ ID NO: 135377 - protein, 10 aa, Homo Sapiens
RSFAGNLNTY

SEQ ID NO: 135378 - protein, 10 aa, Homo Sapiens
RSIPAITRYW

SEQ ID NO: 135379 - protein, 10 aa, Homo Sapiens
RSIQADGLVW

SEQ ID NO: 135380 - protein, 10 aa, Homo Sapiens
RSIQVDGKTI

SEQ ID NO: 135381 - protein, 10 aa, Homo Sapiens
RSLAANLQLL

SEQ ID NO: 135382 - protein, 10 aa, Homo Sapiens
RSLKADLQKL

SEQ ID NO: 135383 - protein, 10 aa, Homo Sapiens
RSLPEPLMTY

SEQ ID NO: 135384 - protein, 10 aa, Homo Sapiens
RSLPLGARCF

SEQ ID NO: 135385 - protein, 10 aa, Homo Sapiens
RSLQAQLQRL

SEQ ID NO: 135386 - protein, 10 aa, Homo Sapiens
RSLSDLFRRY

SEQ ID NO: 135387 - protein, 10 aa, Homo Sapiens
RSMHPELMKY

SEQ ID NO: 135388 - protein, 10 aa, Homo Sapiens
RSMPLGARIL

SEQ ID NO: 135389 - protein, 10 aa, Homo Sapiens
RSRPAVSVTI

SEQ ID NO: 135390 - protein, 10 aa, Homo Sapiens
RSWDQQIKLW

SEQ ID NO: 135391 - protein, 10 aa, Homo Sapiens
RTLDNQLFFF

SEQ ID NO: 135392 - protein, 10 aa, Homo Sapiens
RTLNADLMTL

SEQ ID NO: 135393 - protein, 10 aa, Homo Sapiens
RTLVLRDRNL

SEQ ID NO: 135394 - protein, 10 aa, Homo Sapiens
SLYQSKYEEL

SEQ ID NO: 135395 - protein, 10 aa, Homo Sapiens
TSFGRTAHAL

SEQ ID NO: 135396 - protein, 10 aa, Homo Sapiens
TSSCPLLRTL

SEQ ID NO: 135397 - protein, 10 aa, Homo Sapiens
TSVHPDLMKI

SEQ ID NO: 135398 - protein, 10 aa, Homo Sapiens
VAAPSWLHRF

SEQ ID NO: 135399 - protein, 10 aa, Homo Sapiens
VSIVHSVFEF

SEQ ID NO: 135400 - protein, 10 aa, Homo Sapiens
VSMDNRLMEL

SEQ ID NO: 135401 - protein, 11 aa, Homo Sapiens
AEQNRKDAEAW

SEQ ID NO: 135402 - protein, 11 aa, Homo Sapiens
ASKTKEIEQVY

SEQ ID NO: 135403 - protein, 11 aa, Homo Sapiens
ASLPAELINQI

SEQ ID NO: 135404 - protein, 11 aa, Homo Sapiens
ASLPSELIVHI

SEQ ID NO: 135405 - protein, 11 aa, Homo Sapiens
ATIPVSQISTI

SEQ ID NO: 135406 - protein, 11 aa, Homo Sapiens
ATSGVVAVRLI

SEQ ID NO: 135407 - protein, 11 aa, Homo Sapiens
ESSRSHAVFTI

SEQ ID NO: 135408 - protein, 11 aa, Homo Sapiens
FTQKGNLLRHI

SEQ ID NO: 135409 - protein, 11 aa, Homo Sapiens
GSTIVHAVQRI

SEQ ID NO: 135410 - protein, 11 aa, Homo Sapiens
GSTLSSDLMKL

SEQ ID NO: 135411 - protein, 11 aa, Homo Sapiens
HSALCHSWLSL

SEQ ID NO: 135412 - protein, 11 aa, Homo Sapiens
HSSRSHAIFTI

SEQ ID NO: 135413 - protein, 11 aa, Homo Sapiens
IGKPAHLIVSL

SEQ ID NO: 135414 - protein, 11 aa, Homo Sapiens
ISKKADLLFAL

SEQ ID NO: 135415 - protein, 11 aa, Homo Sapiens
ISLPDDVRRRL

SEQ ID NO: 135416 - protein, 11 aa, Homo Sapiens
ISNPVTKEMLF

SEQ ID NO: 135417 - protein, 11 aa, Homo Sapiens
ISSAEHAGLFL

SEQ ID NO: 135418 - protein, 11 aa, Homo Sapiens
ITKPASVFVQL

SEQ ID NO: 135419 - protein, 11 aa, Homo Sapiens
ITQIEHEVSSS

SEQ ID NO: 135420 - protein, 11 aa, Homo Sapiens
KAFAETHIKGF

SEQ ID NO: 135421 - protein, 11 aa, Homo Sapiens
KAFDRPSLFQI

SEQ ID NO: 135422 - protein, 11 aa, Homo Sapiens
KAFDYPSLFRI

SEQ ID NO: 135423 - protein, 11 aa, Homo Sapiens
KAFPHSSSLRY

SEQ ID NO: 135424 - protein, 11 aa, Homo Sapiens
KAINGKYHRFL

SEQ ID NO: 135425 - protein, 11 aa, Homo Sapiens
KASELHSVRKL

SEQ ID NO: 135426 - protein, 11 aa, Homo Sapiens
KASIEHEALYL

SEQ ID NO: 135427 - protein, 11 aa, Homo Sapiens
KILYPSTLFLL

SEQ ID NO: 135428 - protein, 11 aa, Homo Sapiens
KISSEHARTYI

SEQ ID NO: 135429 - protein, 11 aa, Homo Sapiens
KKDVDNAYMIK

SEQ ID NO: 135430 - protein, 11 aa, Homo Sapiens
KLDPNKAYIQI

SEQ ID NO: 135431 - protein, 11 aa, Homo Sapiens
KLKPEGLHQLL

SEQ ID NO: 135432 - protein, 11 aa, Homo Sapiens
KLNPYRAKVLI

SEQ ID NO: 135433 - protein, 11 aa, Homo Sapiens
KMNPLWNTMVI

SEQ ID NO: 135434 - protein, 11 aa, Homo Sapiens
KNKYEDEINKR

SEQ ID NO: 135435 - protein, 11 aa, Homo Sapiens
KSCGIQDIFVF

SEQ ID NO: 135436 - protein, 11 aa, Homo Sapiens
KSDKAQTKLLI

SEQ ID NO: 135437 - protein, 11 aa, Homo Sapiens
KSFDKNLYRQL

SEQ ID NO: 135438 - protein, 11 aa, Homo Sapiens
KSFEETYDRKL

SEQ ID NO: 135439 - protein, 11 aa, Homo Sapiens
KSFGWPSFITY

SEQ ID NO: 135440 - protein, 11 aa, Homo Sapiens
KSFPAAIEHTI

SEQ ID NO: 135441 - protein, 11 aa, Homo Sapiens
KSFPDTGSLNL

SEQ ID NO: 135442 - protein, 11 aa, Homo Sapiens
KSFPGIPLHHI

SEQ ID NO: 135443 - protein, 11 aa, Homo Sapiens
KSFQKIQVRLV

SEQ ID NO: 135444 - protein, 11 aa, Homo Sapiens
KSFSKSDLVNW

SEQ ID NO: 135445 - protein, 11 aa, Homo Sapiens
KSFSQPGLRSL

SEQ ID NO: 135446 - protein, 11 aa, Homo Sapiens
KSIDSKSFISI

SEQ ID NO: 135447 - protein, 11 aa, Homo Sapiens
KSIGPPEMHKY

SEQ ID NO: 135448 - protein, 11 aa, Homo Sapiens
KSKAMTGVEQW

SEQ ID NO: 135449 - protein, 11 aa, Homo Sapiens
KSKEDLVSQGF

SEQ ID NO: 135450 - protein, 11 aa, Homo Sapiens
KSKGSDKDFVI

SEQ ID NO: 135451 - protein, 11 aa, Homo Sapiens
KSKPDKALSLI

SEQ ID NO: 135452 - protein, 11 aa, Homo Sapiens
KSKPESNEQVL

SEQ ID NO: 135453 - protein, 11 aa, Homo Sapiens
KSKPIIAEPEI

SEQ ID NO: 135454 - protein, 11 aa, Homo Sapiens
KSLEEIYLFSL

SEQ ID NO: 135455 - protein, 11 aa, Homo Sapiens
KSLILPPEHIL

SEQ ID NO: 135456 - protein, 11 aa, Homo Sapiens
KSLPAKVEQIL

SEQ ID NO: 135457 - protein, 11 aa, Homo Sapiens
KSLPATVTQII

SEQ ID NO: 135458 - protein, 11 aa, Homo Sapiens
KSLPEEDVAEI

SEQ ID NO: 135459 - protein, 11 aa, Homo Sapiens
KSLPSLVPLRI

SEQ ID NO: 135460 - protein, 11 aa, Homo Sapiens
KSLPSVLVIHL

SEQ ID NO: 135461 - protein, 11 aa, Homo Sapiens
KSLSALIGQCI

SEQ ID NO: 135462 - protein, 11 aa, Homo Sapiens
KSLSDTAKPHI

SEQ ID NO: 135463 - protein, 11 aa, Homo Sapiens
KSNPYGEWQEI

SEQ ID NO: 135464 - protein, 11 aa, Homo Sapiens
KSRPAHLAVFL

SEQ ID NO: 135465 - protein, 11 aa, Homo Sapiens
KSSPSMAVLYI

SEQ ID NO: 135466 - protein, 11 aa, Homo Sapiens
KSSRSHSVFTL

SEQ ID NO: 135467 - protein, 11 aa, Homo Sapiens
KSVPENLLKCF

SEQ ID NO: 135468 - protein, 11 aa, Homo Sapiens
KSYCSNLVRTL

SEQ ID NO: 135469 - protein, 11 aa, Homo Sapiens
KSYELPDGQVI

SEQ ID NO: 135470 - protein, 11 aa, Homo Sapiens
KSYPGSQSQLF

SEQ ID NO: 135471 - protein, 11 aa, Homo Sapiens
KSYRRKDGVFL

SEQ ID NO: 135472 - protein, 11 aa, Homo Sapiens
KTKDHTLVQTI

SEQ ID NO: 135473 - protein, 11 aa, Homo Sapiens
KTKDSDIYCTL

SEQ ID NO: 135474 - protein, 11 aa, Homo Sapiens
KTLPADVQNYY

SEQ ID NO: 135475 - protein, 11 aa, Homo Sapiens
KTMPAATYRLL

SEQ ID NO: 135476 - protein, 11 aa, Homo Sapiens
KTWAGSQSRRL

SEQ ID NO: 135477 - protein, 11 aa, Homo Sapiens
KVFPSPHILQI

SEQ ID NO: 135478 - protein, 11 aa, Homo Sapiens
KVKDEKIRQAF

SEQ ID NO: 135479 - protein, 11 aa, Homo Sapiens
KVSKLHSKITL

SEQ ID NO: 135480 - protein, 11 aa, Homo Sapiens
LESRIRDVHEL

SEQ ID NO: 135481 - protein, 11 aa, Homo Sapiens
LSAPSYLARSL

SEQ ID NO: 135482 - protein, 11 aa, Homo Sapiens
MSRPFGVALLF

SEQ ID NO: 135483 - protein, 11 aa, Homo Sapiens
MVFNHPAIKKF

SEQ ID NO: 135484 - protein, 11 aa, Homo Sapiens
NGNSSIVGRLL

SEQ ID NO: 135485 - protein, 11 aa, Homo Sapiens
QGPSSNKPRVI

SEQ ID NO: 135486 - protein, 11 aa, Homo Sapiens
QSLPSSVLHII

SEQ ID NO: 135487 - protein, 11 aa, Homo Sapiens
QSSRSHAIFTI

SEQ ID NO: 135488 - protein, 11 aa, Homo Sapiens
RAKLREIEQQI

SEQ ID NO: 135489 - protein, 11 aa, Homo Sapiens
RNKYEDEINKR

SEQ ID NO: 135490 - protein, 11 aa, Homo Sapiens
RSCLEQAKLLF

SEQ ID NO: 135491 - protein, 11 aa, Homo Sapiens
RSFSEGGERLL

SEQ ID NO: 135492 - protein, 11 aa, Homo Sapiens
RSFYAESCFLF

SEQ ID NO: 135493 - protein, 11 aa, Homo Sapiens
RSIAECAVFTW

SEQ ID NO: 135494 - protein, 11 aa, Homo Sapiens
RSIALTQARYL

SEQ ID NO: 135495 - protein, 11 aa, Homo Sapiens
RSISQGLTWTW

SEQ ID NO: 135496 - protein, 11 aa, Homo Sapiens
RSKSYELIRKI

SEQ ID NO: 135497 - protein, 11 aa, Homo Sapiens
RSLQLQEHRLL

SEQ ID NO: 135498 - protein, 11 aa, Homo Sapiens
RSLQPSVLMQL

SEQ ID NO: 135499 - protein, 11 aa, Homo Sapiens
RSLVCDGKRGL

SEQ ID NO: 135500 - protein, 11 aa, Homo Sapiens
RSMPAVMMQNY

SEQ ID NO: 135501 - protein, 11 aa, Homo Sapiens
RSNPKLKDLYI

SEQ ID NO: 135502 - protein, 11 aa, Homo Sapiens
RSSKFAGTRFL

SEQ ID NO: 135503 - protein, 11 aa, Homo Sapiens
RSSRSHAVLLV

SEQ ID NO: 135504 - protein, 11 aa, Homo Sapiens
RSSRSHSVFQL

SEQ ID NO: 135505 - protein, 11 aa, Homo Sapiens
RSVFFGVFQSF

SEQ ID NO: 135506 - protein, 11 aa, Homo Sapiens
RSVPACQVPRL

SEQ ID NO: 135507 - protein, 11 aa, Homo Sapiens
RSYANIKEKLF

SEQ ID NO: 135508 - protein, 11 aa, Homo Sapiens
RSYVTTSTRTY

SEQ ID NO: 135509 - protein, 11 aa, Homo Sapiens
RTICSKVLVQW

SEQ ID NO: 135510 - protein, 11 aa, Homo Sapiens
RTKDLIIEQRF

SEQ ID NO: 135511 - protein, 11 aa, Homo Sapiens
RTLDNQLFFFL

SEQ ID NO: 135512 - protein, 11 aa, Homo Sapiens
RTLEDRGIRKI

SEQ ID NO: 135513 - protein, 11 aa, Homo Sapiens
RTLKEEGPRYL

SEQ ID NO: 135514 - protein, 11 aa, Homo Sapiens
RTLPFYFVQKI

SEQ ID NO: 135515 - protein, 11 aa, Homo Sapiens
RTTVVHGDFRL

SEQ ID NO: 135516 - protein, 11 aa, Homo Sapiens
RVDPNGSRYLL

SEQ ID NO: 135517 - protein, 11 aa, Homo Sapiens
RVNPALAELNL

SEQ ID NO: 135518 - protein, 11 aa, Homo Sapiens
RVYPESIPRKF

SEQ ID NO: 135519 - protein, 11 aa, Homo Sapiens
SPASSTTARVI

SEQ ID NO: 135520 - protein, 11 aa, Homo Sapiens
STMQELNSRLA

SEQ ID NO: 135521 - protein, 11 aa, Homo Sapiens
STSSCPLLRTL

SEQ ID NO: 135522 - protein, 11 aa, Homo Sapiens
SVRGYPTLLLF

SEQ ID NO: 135523 - protein, 11 aa, Homo Sapiens
TEELNREVATN

SEQ ID NO: 135524 - protein, 11 aa, Homo Sapiens
TSSRSHAVFTI

SEQ ID NO: 135525 - protein, 11 aa, Homo Sapiens
TSWREGGGRHI

SEQ ID NO: 135526 - protein, 11 aa, Homo Sapiens
VSDPQHAARLL

SEQ ID NO: 135527 - protein, 11 aa, Homo Sapiens
VSKPAESLPVI

SEQ ID NO: 135528 - protein, 11 aa, Homo Sapiens
VSNLLHSTLQL

SEQ ID NO: 135529 - protein, 11 aa, Homo Sapiens
VSNPYHVVILF

SEQ ID NO: 135530 - protein, 11 aa, Homo Sapiens
YAIREVNINKF

SEQ ID NO: 135531 - protein, 8 aa, Homo Sapiens
AAPAGTTF

SEQ ID NO: 135532 - protein, 8 aa, Homo Sapiens
AAPASGAL

SEQ ID NO: 135533 - protein, 8 aa, Homo Sapiens
AAPATNHI

SEQ ID NO: 135534 - protein, 8 aa, Homo Sapiens
AAPDGPAL

SEQ ID NO: 135535 - protein, 8 aa, Homo Sapiens
AAPLGTTL

SEQ ID NO: 135536 - protein, 8 aa, Homo Sapiens
AAPLHSVL

SEQ ID NO: 135537 - protein, 8 aa, Homo Sapiens
AAPRAEAL

SEQ ID NO: 135538 - protein, 8 aa, Homo Sapiens
AAPSGATL

SEQ ID NO: 135539 - protein, 8 aa, Homo Sapiens
AAPTANLL

SEQ ID NO: 135540 - protein, 8 aa, Homo Sapiens
AAPTGPLL

SEQ ID NO: 135541 - protein, 8 aa, Homo Sapiens
AAPTGTTI

SEQ ID NO: 135542 - protein, 8 aa, Homo Sapiens
AAPTSSAL

SEQ ID NO: 135543 - protein, 8 aa, Homo Sapiens
AGPTAHEL

SEQ ID NO: 135544 - protein, 8 aa, Homo Sapiens
AGPVGGSL

SEQ ID NO: 135545 - protein, 8 aa, Homo Sapiens
ALPIGNEL

SEQ ID NO: 135546 - protein, 8 aa, Homo Sapiens
APTDVKEL

SEQ ID NO: 135547 - protein, 8 aa, Homo Sapiens
ASPNGAEL

SEQ ID NO: 135548 - protein, 8 aa, Homo Sapiens
ASPSGSQL

SEQ ID NO: 135549 - protein, 8 aa, Homo Sapiens
ASPVSPEL

SEQ ID NO: 135550 - protein, 8 aa, Homo Sapiens
AVGLGSCL

SEQ ID NO: 135551 - protein, 8 aa, Homo Sapiens
AVPQGSKL

SEQ ID NO: 135552 - protein, 8 aa, Homo Sapiens
AVPSGNEV

SEQ ID NO: 135553 - protein, 8 aa, Homo Sapiens
CGPVGPKL

SEQ ID NO: 135554 - protein, 8 aa, Homo Sapiens
CSPISSEL

SEQ ID NO: 135555 - protein, 8 aa, Homo Sapiens
CSPVHTTL

SEQ ID NO: 135556 - protein, 8 aa, Homo Sapiens
EAPERPSL

SEQ ID NO: 135557 - protein, 8 aa, Homo Sapiens
EAPQGVEL

SEQ ID NO: 135558 - protein, 8 aa, Homo Sapiens
EAPVGNSL

SEQ ID NO: 135559 - protein, 8 aa, Homo Sapiens
EGPVGSTL

SEQ ID NO: 135560 - protein, 8 aa, Homo Sapiens
ESLIACKA

SEQ ID NO: 135561 - protein, 8 aa, Homo Sapiens
FAERVTSL

SEQ ID NO: 135562 - protein, 8 aa, Homo Sapiens
FAPYGTVM

SEQ ID NO: 135563 - protein, 8 aa, Homo Sapiens
FFQVGSDL

SEQ ID NO: 135564 - protein, 8 aa, Homo Sapiens
FSPAGPIL

SEQ ID NO: 135565 - protein, 8 aa, Homo Sapiens
FSPAGPVL

SEQ ID NO: 135566 - protein, 8 aa, Homo Sapiens
FSPSGHIL

SEQ ID NO: 135567 - protein, 8 aa, Homo Sapiens
FSPTGEIL

SEQ ID NO: 135568 - protein, 8 aa, Homo Sapiens
FSPTGKYL

SEQ ID NO: 135569 - protein, 8 aa, Homo Sapiens
FSPVGSVL

SEQ ID NO: 135570 - protein, 8 aa, Homo Sapiens
FVPVANEL

SEQ ID NO: 135571 - protein, 8 aa, Homo Sapiens
GAPVGIAL

SEQ ID NO: 135572 - protein, 8 aa, Homo Sapiens
GPLRKSSL

SEQ ID NO: 135573 - protein, 8 aa, Homo Sapiens
GSPTGAAL

SEQ ID NO: 135574 - protein, 8 aa, Homo Sapiens
GTPEGLYL

SEQ ID NO: 135575 - protein, 8 aa, Homo Sapiens
IAEPGSVA

SEQ ID NO: 135576 - protein, 8 aa, Homo Sapiens
IAPSAKTL

SEQ ID NO: 135577 - protein, 8 aa, Homo Sapiens
IAPSGHGL

SEQ ID NO: 135578 - protein, 8 aa, Homo Sapiens
IFATVREL

SEQ ID NO: 135579 - protein, 8 aa, Homo Sapiens
IFCPHVAL

SEQ ID NO: 135580 - protein, 8 aa, Homo Sapiens
IFKDHVSL

SEQ ID NO: 135581 - protein, 8 aa, Homo Sapiens
IFQPVAEL

SEQ ID NO: 135582 - protein, 8 aa, Homo Sapiens
IFQVAQEL

SEQ ID NO: 135583 - protein, 8 aa, Homo Sapiens
IFSEHSCL

SEQ ID NO: 135584 - protein, 8 aa, Homo Sapiens
IGPKGNSL

SEQ ID NO: 135585 - protein, 8 aa, Homo Sapiens
IGPKGSTL

SEQ ID NO: 135586 - protein, 8 aa, Homo Sapiens
IPHIHKSL

SEQ ID NO: 135587 - protein, 8 aa, Homo Sapiens
ISPHGNAL

SEQ ID NO: 135588 - protein, 8 aa, Homo Sapiens
ISPVANEM

SEQ ID NO: 135589 - protein, 8 aa, Homo Sapiens
ITPTGHSL

SEQ ID NO: 135590 - protein, 8 aa, Homo Sapiens
IVPVGEAL

SEQ ID NO: 135591 - protein, 8 aa, Homo Sapiens
KAPNASNL

SEQ ID NO: 135592 - protein, 8 aa, Homo Sapiens
KMPEHSTL

SEQ ID NO: 135593 - protein, 8 aa, Homo Sapiens
LFENGPCL

SEQ ID NO: 135594 - protein, 8 aa, Homo Sapiens
LLWPGAAL

SEQ ID NO: 135595 - protein, 8 aa, Homo Sapiens
LSPDGTVL

SEQ ID NO: 135596 - protein, 8 aa, Homo Sapiens
LTPTHGEM

SEQ ID NO: 135597 - protein, 8 aa, Homo Sapiens
LVPSGSEL

SEQ ID NO: 135598 - protein, 8 aa, Homo Sapiens
MAPNHQTL

SEQ ID NO: 135599 - protein, 8 aa, Homo Sapiens
MMPKGAAL

SEQ ID NO: 135600 - protein, 8 aa, Homo Sapiens
MSPIGTDL

SEQ ID NO: 135601 - protein, 8 aa, Homo Sapiens
MSPQGQVL

SEQ ID NO: 135602 - protein, 8 aa, Homo Sapiens
MSPTGDFL

SEQ ID NO: 135603 - protein, 8 aa, Homo Sapiens
MVASGSEL

SEQ ID NO: 135604 - protein, 8 aa, Homo Sapiens
NAPNHMEL

SEQ ID NO: 135605 - protein, 8 aa, Homo Sapiens
NAPVGTEL

SEQ ID NO: 135606 - protein, 8 aa, Homo Sapiens
NGPTHMEL

SEQ ID NO: 135607 - protein, 8 aa, Homo Sapiens
NSPMSPAL

SEQ ID NO: 135608 - protein, 8 aa, Homo Sapiens
NSPVGNQL

SEQ ID NO: 135609 - protein, 8 aa, Homo Sapiens
NTPNGNSL

SEQ ID NO: 135610 - protein, 8 aa, Homo Sapiens
NVATHSTL

SEQ ID NO: 135611 - protein, 8 aa, Homo Sapiens
NVGTGEAL

SEQ ID NO: 135612 - protein, 8 aa, Homo Sapiens
NVPISPAL

SEQ ID NO: 135613 - protein, 8 aa, Homo Sapiens
NVPVGKVL

SEQ ID NO: 135614 - protein, 8 aa, Homo Sapiens
QAPEATVL

SEQ ID NO: 135615 - protein, 8 aa, Homo Sapiens
QAPIAAVL

SEQ ID NO: 135616 - protein, 8 aa, Homo Sapiens
QAPVAAVL

SEQ ID NO: 135617 - protein, 8 aa, Homo Sapiens
QLQLRSLA

SEQ ID NO: 135618 - protein, 8 aa, Homo Sapiens
QSPQGRVM

SEQ ID NO: 135619 - protein, 8 aa, Homo Sapiens
RVPEGQHL

SEQ ID NO: 135620 - protein, 8 aa, Homo Sapiens
SAPAGETL

SEQ ID NO: 135621 - protein, 8 aa, Homo Sapiens
SAPIHTQM

SEQ ID NO: 135622 - protein, 8 aa, Homo Sapiens
SAPNHCTL

SEQ ID NO: 135623 - protein, 8 aa, Homo Sapiens
SAPSAIAL

SEQ ID NO: 135624 - protein, 8 aa, Homo Sapiens
SFEAQGAL

SEQ ID NO: 135625 - protein, 8 aa, Homo Sapiens
SGPLGTEM

SEQ ID NO: 135626 - protein, 8 aa, Homo Sapiens
SGPTAEAL

SEQ ID NO: 135627 - protein, 8 aa, Homo Sapiens
SIKPGPEL

SEQ ID NO: 135628 - protein, 8 aa, Homo Sapiens
SPKVKMAL

SEQ ID NO: 135629 - protein, 8 aa, Homo Sapiens
SSPCAAEL

SEQ ID NO: 135630 - protein, 8 aa, Homo Sapiens
SSPCHIEM

SEQ ID NO: 135631 - protein, 8 aa, Homo Sapiens
SSPEHPEL

SEQ ID NO: 135632 - protein, 8 aa, Homo Sapiens
SSPIGKSV

SEQ ID NO: 135633 - protein, 8 aa, Homo Sapiens
SSPLSKEL

SEQ ID NO: 135634 - protein, 8 aa, Homo Sapiens
SSPTGTGL

SEQ ID NO: 135635 - protein, 8 aa, Homo Sapiens
STPEGIAL

SEQ ID NO: 135636 - protein, 8 aa, Homo Sapiens
STPFGQAL

SEQ ID NO: 135637 - protein, 8 aa, Homo Sapiens
STPGYSSL

SEQ ID NO: 135638 - protein, 8 aa, Homo Sapiens
SVATGSTL

SEQ ID NO: 135639 - protein, 8 aa, Homo Sapiens
SVPTADEL

SEQ ID NO: 135640 - protein, 8 aa, Homo Sapiens
TAPIGHIL

SEQ ID NO: 135641 - protein, 8 aa, Homo Sapiens
TAPLAHDL

SEQ ID NO: 135642 - protein, 8 aa, Homo Sapiens
TAPLRAEL

SEQ ID NO: 135643 - protein, 8 aa, Homo Sapiens
TAPSSSSL

SEQ ID NO: 135644 - protein, 8 aa, Homo Sapiens
TAPTGEYL

SEQ ID NO: 135645 - protein, 8 aa, Homo Sapiens
TAPVGINM

SEQ ID NO: 135646 - protein, 8 aa, Homo Sapiens
TFLNHPAL

SEQ ID NO: 135647 - protein, 8 aa, Homo Sapiens
TGPEGHVL

SEQ ID NO: 135648 - protein, 8 aa, Homo Sapiens
TLPVASAL

SEQ ID NO: 135649 - protein, 8 aa, Homo Sapiens
TSPLGSLS

SEQ ID NO: 135650 - protein, 8 aa, Homo Sapiens
VAPAGITL

SEQ ID NO: 135651 - protein, 8 aa, Homo Sapiens
VAPAGVTL

SEQ ID NO: 135652 - protein, 8 aa, Homo Sapiens
VAPEEHPV

SEQ ID NO: 135653 - protein, 8 aa, Homo Sapiens
VAPIAEQL

SEQ ID NO: 135654 - protein, 8 aa, Homo Sapiens
VAPSAVNL

SEQ ID NO: 135655 - protein, 8 aa, Homo Sapiens
VAPVAGQL

SEQ ID NO: 135656 - protein, 8 aa, Homo Sapiens
VAPVGSGL

SEQ ID NO: 135657 - protein, 8 aa, Homo Sapiens
VFDPHGTL

SEQ ID NO: 135658 - protein, 8 aa, Homo Sapiens
VFFCHGEL

SEQ ID NO: 135659 - protein, 8 aa, Homo Sapiens
VFHAGTAL

SEQ ID NO: 135660 - protein, 8 aa, Homo Sapiens
VFHPRQEL

SEQ ID NO: 135661 - protein, 8 aa, Homo Sapiens
VFLDHNAL

SEQ ID NO: 135662 - protein, 8 aa, Homo Sapiens
VFLPSHSL

SEQ ID NO: 135663 - protein, 8 aa, Homo Sapiens
VFQPVAEL

SEQ ID NO: 135664 - protein, 8 aa, Homo Sapiens
VFVTVKEL

SEQ ID NO: 135665 - protein, 8 aa, Homo Sapiens
VGPLGSTI

SEQ ID NO: 135666 - protein, 8 aa, Homo Sapiens
VLPVGTEL

SEQ ID NO: 135667 - protein, 8 aa, Homo Sapiens
VNDISSMS

SEQ ID NO: 135668 - protein, 8 aa, Homo Sapiens
VSPCGAYL

SEQ ID NO: 135669 - protein, 8 aa, Homo Sapiens
VSPESQEM

SEQ ID NO: 135670 - protein, 8 aa, Homo Sapiens
VSPLHRVL

SEQ ID NO: 135671 - protein, 8 aa, Homo Sapiens
VSPNGQHL

SEQ ID NO: 135672 - protein, 8 aa, Homo Sapiens
VSQVGKEL

SEQ ID NO: 135673 - protein, 8 aa, Homo Sapiens
VTPNHSAF

SEQ ID NO: 135674 - protein, 8 aa, Homo Sapiens
VVGTGTSL

SEQ ID NO: 135675 - protein, 8 aa, Homo Sapiens
VVPQAIEL

SEQ ID NO: 135676 - protein, 8 aa, Homo Sapiens
VVPTALEL

SEQ ID NO: 135677 - protein, 8 aa, Homo Sapiens
VVPTAPEL

SEQ ID NO: 135678 - protein, 8 aa, Homo Sapiens
VVPTSQSL

SEQ ID NO: 135679 - protein, 8 aa, Homo Sapiens
VVPYGTPL

SEQ ID NO: 135680 - protein, 8 aa, Homo Sapiens
WAPESAPL

SEQ ID NO: 135681 - protein, 8 aa, Homo Sapiens
WAPSGNLL

SEQ ID NO: 135682 - protein, 8 aa, Homo Sapiens
WSPCGNYL

SEQ ID NO: 135683 - protein, 8 aa, Homo Sapiens
WSPTHPAL

SEQ ID NO: 135684 - protein, 8 aa, Homo Sapiens
YAPAAATV

SEQ ID NO: 135685 - protein, 8 aa, Homo Sapiens
YAPSGCAI

SEQ ID NO: 135686 - protein, 8 aa, Homo Sapiens
YFENRKAL

SEQ ID NO: 135687 - protein, 8 aa, Homo Sapiens
YFNEGTVL

SEQ ID NO: 135688 - protein, 8 aa, Homo Sapiens
YGPEGLEL

SEQ ID NO: 135689 - protein, 8 aa, Homo Sapiens
YSPEGHVL

SEQ ID NO: 135690 - protein, 8 aa, Homo Sapiens
YSPHGHIL

SEQ ID NO: 135691 - protein, 8 aa, Homo Sapiens
YSPTSKAL

SEQ ID NO: 135692 - protein, 8 aa, Homo Sapiens
YTPEGTVL

SEQ ID NO: 135693 - protein, 8 aa, Homo Sapiens
YVPEVSAL

SEQ ID NO: 135694 - protein, 8 aa, Homo Sapiens
YWQNHPEL

SEQ ID NO: 135695 - protein, 9 aa, Homo Sapiens
AAAAATMAL

SEQ ID NO: 135696 - protein, 9 aa, Homo Sapiens
AANFSDRSL

SEQ ID NO: 135697 - protein, 9 aa, Homo Sapiens
AAPAGTTFV

SEQ ID NO: 135698 - protein, 9 aa, Homo Sapiens
AAPALASSL

SEQ ID NO: 135699 - protein, 9 aa, Homo Sapiens
AAPAPTAVV

SEQ ID NO: 135700 - protein, 9 aa, Homo Sapiens
AAPAYSRAL

SEQ ID NO: 135701 - protein, 9 aa, Homo Sapiens
AAPDGTRNL

SEQ ID NO: 135702 - protein, 9 aa, Homo Sapiens
AAPEGAGAL

SEQ ID NO: 135703 - protein, 9 aa, Homo Sapiens
AAPESGLEV

SEQ ID NO: 135704 - protein, 9 aa, Homo Sapiens
AAPESSTSF

SEQ ID NO: 135705 - protein, 9 aa, Homo Sapiens
AAPESYEEL

SEQ ID NO: 135706 - protein, 9 aa, Homo Sapiens
AAPFPRGEL

SEQ ID NO: 135707 - protein, 9 aa, Homo Sapiens
AAPFSYHST

SEQ ID NO: 135708 - protein, 9 aa, Homo Sapiens
AAPGEFRAI

SEQ ID NO: 135709 - protein, 9 aa, Homo Sapiens
AAPGGWLQV

SEQ ID NO: 135710 - protein, 9 aa, Homo Sapiens
AAPGPSAAF

SEQ ID NO: 135711 - protein, 9 aa, Homo Sapiens
AAPHSIESF

SEQ ID NO: 135712 - protein, 9 aa, Homo Sapiens
AAPIAITCF

SEQ ID NO: 135713 - protein, 9 aa, Homo Sapiens
AAPIRLLAA

SEQ ID NO: 135714 - protein, 9 aa, Homo Sapiens
AAPLSGQTF

SEQ ID NO: 135715 - protein, 9 aa, Homo Sapiens
AAPPAAQTL

SEQ ID NO: 135716 - protein, 9 aa, Homo Sapiens
AAPPAGGTL

SEQ ID NO: 135717 - protein, 9 aa, Homo Sapiens
AAPPWALGL

SEQ ID NO: 135718 - protein, 9 aa, Homo Sapiens
AAPRAPSAL

SEQ ID NO: 135719 - protein, 9 aa, Homo Sapiens
AAPSGSGTL

SEQ ID NO: 135720 - protein, 9 aa, Homo Sapiens
AAPSKACML

SEQ ID NO: 135721 - protein, 9 aa, Homo Sapiens
AAPSPFAEL

SEQ ID NO: 135722 - protein, 9 aa, Homo Sapiens
AAPTAITEA

SEQ ID NO: 135723 - protein, 9 aa, Homo Sapiens
AAPTAQKSL

SEQ ID NO: 135724 - protein, 9 aa, Homo Sapiens
AAPTRPSAL

SEQ ID NO: 135725 - protein, 9 aa, Homo Sapiens
AAPTSAAAL

SEQ ID NO: 135726 - protein, 9 aa, Homo Sapiens
AAPTTGNQI

SEQ ID NO: 135727 - protein, 9 aa, Homo Sapiens
AAPTVNQFL

SEQ ID NO: 135728 - protein, 9 aa, Homo Sapiens
AAPVATGAV

SEQ ID NO: 135729 - protein, 9 aa, Homo Sapiens
AAPVPTTTL

SEQ ID NO: 135730 - protein, 9 aa, Homo Sapiens
AAPVSTSEL

SEQ ID NO: 135731 - protein, 9 aa, Homo Sapiens
AAPVVPQAL

SEQ ID NO: 135732 - protein, 9 aa, Homo Sapiens
AAPWTEETV

SEQ ID NO: 135733 - protein, 9 aa, Homo Sapiens
AAPYGIESM

SEQ ID NO: 135734 - protein, 9 aa, Homo Sapiens
AFSPSSDSL

SEQ ID NO: 135735 - protein, 9 aa, Homo Sapiens
AGPGPGAVL

SEQ ID NO: 135736 - protein, 9 aa, Homo Sapiens
AGPMRQISL

SEQ ID NO: 135737 - protein, 9 aa, Homo Sapiens
AGPPAAAEV

SEQ ID NO: 135738 - protein, 9 aa, Homo Sapiens
AGPPATSEL

SEQ ID NO: 135739 - protein, 9 aa, Homo Sapiens
AGPPAVHGL

SEQ ID NO: 135740 - protein, 9 aa, Homo Sapiens
AGPPDTISL

SEQ ID NO: 135741 - protein, 9 aa, Homo Sapiens
AGPPHTCPL

SEQ ID NO: 135742 - protein, 9 aa, Homo Sapiens
AGPPRCSSL

SEQ ID NO: 135743 - protein, 9 aa, Homo Sapiens
AGPSHVAAM

SEQ ID NO: 135744 - protein, 9 aa, Homo Sapiens
AGPSVVNHM

SEQ ID NO: 135745 - protein, 9 aa, Homo Sapiens
AIIRDRAAL

SEQ ID NO: 135746 - protein, 9 aa, Homo Sapiens
AINHDTKEL

SEQ ID NO: 135747 - protein, 9 aa, Homo Sapiens
AIPDHARQL

SEQ ID NO: 135748 - protein, 9 aa, Homo Sapiens
AIPLHASSL

SEQ ID NO: 135749 - protein, 9 aa, Homo Sapiens
AIPLKASVL

SEQ ID NO: 135750 - protein, 9 aa, Homo Sapiens
ALGDPASAL

SEQ ID NO: 135751 - protein, 9 aa, Homo Sapiens
ALIPETTTL

SEQ ID NO: 135752 - protein, 9 aa, Homo Sapiens
ALPEAIAAL

SEQ ID NO: 135753 - protein, 9 aa, Homo Sapiens
ALPEEVQEL

SEQ ID NO: 135754 - protein, 9 aa, Homo Sapiens
ALPEWISCL

SEQ ID NO: 135755 - protein, 9 aa, Homo Sapiens
ALPGFAEAL

SEQ ID NO: 135756 - protein, 9 aa, Homo Sapiens
ALPLGGKAL

SEQ ID NO: 135757 - protein, 9 aa, Homo Sapiens
ALPQEFAAL

SEQ ID NO: 135758 - protein, 9 aa, Homo Sapiens
ALPQPTSVL

SEQ ID NO: 135759 - protein, 9 aa, Homo Sapiens
AMPFKCMQL

SEQ ID NO: 135760 - protein, 9 aa, Homo Sapiens
ASAPALTLS

SEQ ID NO: 135761 - protein, 9 aa, Homo Sapiens
ASPAVGQPL

SEQ ID NO: 135762 - protein, 9 aa, Homo Sapiens
ASPCGAWAL

SEQ ID NO: 135763 - protein, 9 aa, Homo Sapiens
ASPDRTHVL

SEQ ID NO: 135764 - protein, 9 aa, Homo Sapiens
ASPEAGNTL

SEQ ID NO: 135765 - protein, 9 aa, Homo Sapiens
ASPESGLEV

SEQ ID NO: 135766 - protein, 9 aa, Homo Sapiens
ASPESISSL

SEQ ID NO: 135767 - protein, 9 aa, Homo Sapiens
ASPKVRLSL

SEQ ID NO: 135768 - protein, 9 aa, Homo Sapiens
ASPLRESAL

SEQ ID NO: 135769 - protein, 9 aa, Homo Sapiens
ASPLRLQSH

SEQ ID NO: 135770 - protein, 9 aa, Homo Sapiens
ASPPARDAL

SEQ ID NO: 135771 - protein, 9 aa, Homo Sapiens
ASPPPVSEL

SEQ ID NO: 135772 - protein, 9 aa, Homo Sapiens
ASPSAASQL

SEQ ID NO: 135773 - protein, 9 aa, Homo Sapiens
ASPSRLLSL

SEQ ID NO: 135774 - protein, 9 aa, Homo Sapiens
ASPSSIRSL

SEQ ID NO: 135775 - protein, 9 aa, Homo Sapiens
ASPTACRAV

SEQ ID NO: 135776 - protein, 9 aa, Homo Sapiens
ASPVRLLSL

SEQ ID NO: 135777 - protein, 9 aa, Homo Sapiens
ASPVSFQEL

SEQ ID NO: 135778 - protein, 9 aa, Homo Sapiens
ATPVVVRSL

SEQ ID NO: 135779 - protein, 9 aa, Homo Sapiens
AVAAYRRAL

SEQ ID NO: 135780 - protein, 9 aa, Homo Sapiens
AVFGEATNL

SEQ ID NO: 135781 - protein, 9 aa, Homo Sapiens
AVIGSTEEL

SEQ ID NO: 135782 - protein, 9 aa, Homo Sapiens
AVISGVMSL

SEQ ID NO: 135783 - protein, 9 aa, Homo Sapiens
AVPEHAARL

SEQ ID NO: 135784 - protein, 9 aa, Homo Sapiens
AVPFSLDSV

SEQ ID NO: 135785 - protein, 9 aa, Homo Sapiens
AVPIYSSAL

SEQ ID NO: 135786 - protein, 9 aa, Homo Sapiens
AVPLCKQAL

SEQ ID NO: 135787 - protein, 9 aa, Homo Sapiens
CAPRRKVAL

SEQ ID NO: 135788 - protein, 9 aa, Homo Sapiens
CGPASQSTL

SEQ ID NO: 135789 - protein, 9 aa, Homo Sapiens
CGPGGVDHL

SEQ ID NO: 135790 - protein, 9 aa, Homo Sapiens
CGPHTLHSL

SEQ ID NO: 135791 - protein, 9 aa, Homo Sapiens
CSPGRLAVL

SEQ ID NO: 135792 - protein, 9 aa, Homo Sapiens
CSPKQGVSL

SEQ ID NO: 135793 - protein, 9 aa, Homo Sapiens
CTPQAAKAI

SEQ ID NO: 135794 - protein, 9 aa, Homo Sapiens
CVIGVARSL

SEQ ID NO: 135795 - protein, 9 aa, Homo Sapiens
DAPVSELSL

SEQ ID NO: 135796 - protein, 9 aa, Homo Sapiens
EAPESAQCL

SEQ ID NO: 135797 - protein, 9 aa, Homo Sapiens
EAPFSNLEL

SEQ ID NO: 135798 - protein, 9 aa, Homo Sapiens
EAPPAFSHL

SEQ ID NO: 135799 - protein, 9 aa, Homo Sapiens
EGPPVTTVL

SEQ ID NO: 135800 - protein, 9 aa, Homo Sapiens
EMPDSAAAL

SEQ ID NO: 135801 - protein, 9 aa, Homo Sapiens
ESPAPKQEL

SEQ ID NO: 135802 - protein, 9 aa, Homo Sapiens
EVPGPAAAL

SEQ ID NO: 135803 - protein, 9 aa, Homo Sapiens
FAPASAAAA

SEQ ID NO: 135804 - protein, 9 aa, Homo Sapiens
FAPAVGPAL

SEQ ID NO: 135805 - protein, 9 aa, Homo Sapiens
FAPEKLQEL

SEQ ID NO: 135806 - protein, 9 aa, Homo Sapiens
FAPENTCHL

SEQ ID NO: 135807 - protein, 9 aa, Homo Sapiens
FAPGDLPEL

SEQ ID NO: 135808 - protein, 9 aa, Homo Sapiens
FAPIQPLAM

SEQ ID NO: 135809 - protein, 9 aa, Homo Sapiens
FAPQHMAML

SEQ ID NO: 135810 - protein, 9 aa, Homo Sapiens
FAPYERRAM

SEQ ID NO: 135811 - protein, 9 aa, Homo Sapiens
FFDEKLNSL

SEQ ID NO: 135812 - protein, 9 aa, Homo Sapiens
FFPEYTHQL

SEQ ID NO: 135813 - protein, 9 aa, Homo Sapiens
FGPEWLRAL

SEQ ID NO: 135814 - protein, 9 aa, Homo Sapiens
FGPGPGSNF

SEQ ID NO: 135815 - protein, 9 aa, Homo Sapiens
FGPIADIAM

SEQ ID NO: 135816 - protein, 9 aa, Homo Sapiens
FIAPTGHSL

SEQ ID NO: 135817 - protein, 9 aa, Homo Sapiens
FIFSDTHEL

SEQ ID NO: 135818 - protein, 9 aa, Homo Sapiens
FIISRTQAL

SEQ ID NO: 135819 - protein, 9 aa, Homo Sapiens
FIIYDTHSL

SEQ ID NO: 135820 - protein, 9 aa, Homo Sapiens
FIMDRAQAL

SEQ ID NO: 135821 - protein, 9 aa, Homo Sapiens
FINGDISSL

SEQ ID NO: 135822 - protein, 9 aa, Homo Sapiens
FIPFSVSSV

SEQ ID NO: 135823 - protein, 9 aa, Homo Sapiens
FIPKNYIEM

SEQ ID NO: 135824 - protein, 9 aa, Homo Sapiens
FIPWGPASI

SEQ ID NO: 135825 - protein, 9 aa, Homo Sapiens
FIQEIEHAL

SEQ ID NO: 135826 - protein, 9 aa, Homo Sapiens
FISGHTSEL

SEQ ID NO: 135827 - protein, 9 aa, Homo Sapiens
FISPTGHSL

SEQ ID NO: 135828 - protein, 9 aa, Homo Sapiens
FLPDHPIVL

SEQ ID NO: 135829 - protein, 9 aa, Homo Sapiens
FLPEAPAEL

SEQ ID NO: 135830 - protein, 9 aa, Homo Sapiens
FLPFCHSEL

SEQ ID NO: 135831 - protein, 9 aa, Homo Sapiens
FLPGFSQSL

SEQ ID NO: 135832 - protein, 9 aa, Homo Sapiens
FLPGISTAL

SEQ ID NO: 135833 - protein, 9 aa, Homo Sapiens
FLPLHYDYL

SEQ ID NO: 135834 - protein, 9 aa, Homo Sapiens
FLPNAPKAL

SEQ ID NO: 135835 - protein, 9 aa, Homo Sapiens
FLPSHYNYL

SEQ ID NO: 135836 - protein, 9 aa, Homo Sapiens
FLPSPLHAL

SEQ ID NO: 135837 - protein, 9 aa, Homo Sapiens
FLQGDTSVL

SEQ ID NO: 135838 - protein, 9 aa, Homo Sapiens
FMNSVIQSL

SEQ ID NO: 135839 - protein, 9 aa, Homo Sapiens
FMPKSYEAL

SEQ ID NO: 135840 - protein, 9 aa, Homo Sapiens
FMPPGLQEL

SEQ ID NO: 135841 - protein, 9 aa, Homo Sapiens
FSPAPRPEM

SEQ ID NO: 135842 - protein, 9 aa, Homo Sapiens
FSPAPSLSL

SEQ ID NO: 135843 - protein, 9 aa, Homo Sapiens
FSPDSRHVL

SEQ ID NO: 135844 - protein, 9 aa, Homo Sapiens
FSPFHASVL

SEQ ID NO: 135845 - protein, 9 aa, Homo Sapiens
FSPFNPTSL

SEQ ID NO: 135846 - protein, 9 aa, Homo Sapiens
FSPISDIGL

SEQ ID NO: 135847 - protein, 9 aa, Homo Sapiens
FSPLPTPAL

SEQ ID NO: 135848 - protein, 9 aa, Homo Sapiens
FSPLRIWDL

SEQ ID NO: 135849 - protein, 9 aa, Homo Sapiens
FSPNRVIGL

SEQ ID NO: 135850 - protein, 9 aa, Homo Sapiens
FSPNVPKSL

SEQ ID NO: 135851 - protein, 9 aa, Homo Sapiens
FSPSSLSSL

SEQ ID NO: 135852 - protein, 9 aa, Homo Sapiens
FVIETARQL

SEQ ID NO: 135853 - protein, 9 aa, Homo Sapiens
FVIPVVQAL

SEQ ID NO: 135854 - protein, 9 aa, Homo Sapiens
FVPETKEEL

SEQ ID NO: 135855 - protein, 9 aa, Homo Sapiens
FVPETQVSL

SEQ ID NO: 135856 - protein, 9 aa, Homo Sapiens
FVPGTTAVL

SEQ ID NO: 135857 - protein, 9 aa, Homo Sapiens
FVPRHTRNL

SEQ ID NO: 135858 - protein, 9 aa, Homo Sapiens
FVPSDKSAL

SEQ ID NO: 135859 - protein, 9 aa, Homo Sapiens
FVPVVYHDL

SEQ ID NO: 135860 - protein, 9 aa, Homo Sapiens
FVTFTTRAM

SEQ ID NO: 135861 - protein, 9 aa, Homo Sapiens
GAPAGVREV

SEQ ID NO: 135862 - protein, 9 aa, Homo Sapiens
GAPERAAEL

SEQ ID NO: 135863 - protein, 9 aa, Homo Sapiens
GAPFTGSSL

SEQ ID NO: 135864 - protein, 9 aa, Homo Sapiens
GAPGAVTTL

SEQ ID NO: 135865 - protein, 9 aa, Homo Sapiens
GAPGGACEL

SEQ ID NO: 135866 - protein, 9 aa, Homo Sapiens
GAPLSLVDL

SEQ ID NO: 135867 - protein, 9 aa, Homo Sapiens
GGLPEGPVL

SEQ ID NO: 135868 - protein, 9 aa, Homo Sapiens
GIPAGWMGL

SEQ ID NO: 135869 - protein, 9 aa, Homo Sapiens
GIPEHADNL

SEQ ID NO: 135870 - protein, 9 aa, Homo Sapiens
GIPGTRGPI

SEQ ID NO: 135871 - protein, 9 aa, Homo Sapiens
GIPSAFLEL

SEQ ID NO: 135872 - protein, 9 aa, Homo Sapiens
GLPEKVLSL

SEQ ID NO: 135873 - protein, 9 aa, Homo Sapiens
GMPPPHLQR

SEQ ID NO: 135874 - protein, 9 aa, Homo Sapiens
GQPEAVARL

SEQ ID NO: 135875 - protein, 9 aa, Homo Sapiens
GSPVFLCAL

SEQ ID NO: 135876 - protein, 9 aa, Homo Sapiens
GTPGSRPGL

SEQ ID NO: 135877 - protein, 9 aa, Homo Sapiens
GVAIGQTSL

SEQ ID NO: 135878 - protein, 9 aa, Homo Sapiens
HAPDNFREL

SEQ ID NO: 135879 - protein, 9 aa, Homo Sapiens
HAPFTATSL

SEQ ID NO: 135880 - protein, 9 aa, Homo Sapiens
HAPLSGESL

SEQ ID NO: 135881 - protein, 9 aa, Homo Sapiens
HAPVRPVTL

SEQ ID NO: 135882 - protein, 9 aa, Homo Sapiens
HFYGKAIEL

SEQ ID NO: 135883 - protein, 9 aa, Homo Sapiens
HGPGPVGAL

SEQ ID NO: 135884 - protein, 9 aa, Homo Sapiens
HGPRAVSCL

SEQ ID NO: 135885 - protein, 9 aa, Homo Sapiens
HHPDYNNEL

SEQ ID NO: 135886 - protein, 9 aa, Homo Sapiens
HIIAGAGEL

SEQ ID NO: 135887 - protein, 9 aa, Homo Sapiens
HIPDVITYL

SEQ ID NO: 135888 - protein, 9 aa, Homo Sapiens
HIPEQTTQL

SEQ ID NO: 135889 - protein, 9 aa, Homo Sapiens
HISSQNSEL

SEQ ID NO: 135890 - protein, 9 aa, Homo Sapiens
HLAEKTSSL

SEQ ID NO: 135891 - protein, 9 aa, Homo Sapiens
HLPAHSQSL

SEQ ID NO: 135892 - protein, 9 aa, Homo Sapiens
HLPDMHSEL

SEQ ID NO: 135893 - protein, 9 aa, Homo Sapiens
HLPPGFLHL

SEQ ID NO: 135894 - protein, 9 aa, Homo Sapiens
HLPPTFHAV

SEQ ID NO: 135895 - protein, 9 aa, Homo Sapiens
HLPSGVKSL

SEQ ID NO: 135896 - protein, 9 aa, Homo Sapiens
HLQEYTSTL

SEQ ID NO: 135897 - protein, 9 aa, Homo Sapiens
HSPAGSQAL

SEQ ID NO: 135898 - protein, 9 aa, Homo Sapiens
HSPEEAREL

SEQ ID NO: 135899 - protein, 9 aa, Homo Sapiens
HSPGAVSSL

SEQ ID NO: 135900 - protein, 9 aa, Homo Sapiens
HVITKTMEL

SEQ ID NO: 135901 - protein, 9 aa, Homo Sapiens
HVNVSGNEL

SEQ ID NO: 135902 - protein, 9 aa, Homo Sapiens
HVPAPKLAL

SEQ ID NO: 135903 - protein, 9 aa, Homo Sapiens
HVPEHAVVL

SEQ ID NO: 135904 - protein, 9 aa, Homo Sapiens
HVPGWLRPL

SEQ ID NO: 135905 - protein, 9 aa, Homo Sapiens
HWEVRIKEL

SEQ ID NO: 135906 - protein, 9 aa, Homo Sapiens
IAPEGSLVF

SEQ ID NO: 135907 - protein, 9 aa, Homo Sapiens
IAPERRFYL

SEQ ID NO: 135908 - protein, 9 aa, Homo Sapiens
IAPESDYSL

SEQ ID NO: 135909 - protein, 9 aa, Homo Sapiens
IAPETGENL

SEQ ID NO: 135910 - protein, 9 aa, Homo Sapiens
IAPETRRSI

SEQ ID NO: 135911 - protein, 9 aa, Homo Sapiens
IAPGHVSVI

SEQ ID NO: 135912 - protein, 9 aa, Homo Sapiens
IAPGVTHEL

SEQ ID NO: 135913 - protein, 9 aa, Homo Sapiens
IAPHARNGL

SEQ ID NO: 135914 - protein, 9 aa, Homo Sapiens
IAPKPAAHL

SEQ ID NO: 135915 - protein, 9 aa, Homo Sapiens
IAPKSTSVF

SEQ ID NO: 135916 - protein, 9 aa, Homo Sapiens
IAPLRVLSF

SEQ ID NO: 135917 - protein, 9 aa, Homo Sapiens
IAPNGALQL

SEQ ID NO: 135918 - protein, 9 aa, Homo Sapiens
IAPQRIPSL

SEQ ID NO: 135919 - protein, 9 aa, Homo Sapiens
IAPSRKVTF

SEQ ID NO: 135920 - protein, 9 aa, Homo Sapiens
IAPSRPWAL

SEQ ID NO: 135921 - protein, 9 aa, Homo Sapiens
IFEAAKQEL

SEQ ID NO: 135922 - protein, 9 aa, Homo Sapiens
IFEGGATEL

SEQ ID NO: 135923 - protein, 9 aa, Homo Sapiens
IFQTAKETL

SEQ ID NO: 135924 - protein, 9 aa, Homo Sapiens
IFRVNLRTL

SEQ ID NO: 135925 - protein, 9 aa, Homo Sapiens
IFVPARNNM

SEQ ID NO: 135926 - protein, 9 aa, Homo Sapiens
IGPTTARAL

SEQ ID NO: 135927 - protein, 9 aa, Homo Sapiens
IINDLLQSL

SEQ ID NO: 135928 - protein, 9 aa, Homo Sapiens
IINGEATML

SEQ ID NO: 135929 - protein, 9 aa, Homo Sapiens
IIPVGGTYL

SEQ ID NO: 135930 - protein, 9 aa, Homo Sapiens
IIPYITNVL

SEQ ID NO: 135931 - protein, 9 aa, Homo Sapiens
IIYTAKISL

SEQ ID NO: 135932 - protein, 9 aa, Homo Sapiens
IKEPIWETL

SEQ ID NO: 135933 - protein, 9 aa, Homo Sapiens
ILISTPESL

SEQ ID NO: 135934 - protein, 9 aa, Homo Sapiens
ILPEQHMSL

SEQ ID NO: 135935 - protein, 9 aa, Homo Sapiens
ILPISQESL

SEQ ID NO: 135936 - protein, 9 aa, Homo Sapiens
ILPLRNWLL

SEQ ID NO: 135937 - protein, 9 aa, Homo Sapiens
ILPPSAHEL

SEQ ID NO: 135938 - protein, 9 aa, Homo Sapiens
IMPNVTISL

SEQ ID NO: 135939 - protein, 9 aa, Homo Sapiens
ISPDTVGTL

SEQ ID NO: 135940 - protein, 9 aa, Homo Sapiens
ISPEFFTVL

SEQ ID NO: 135941 - protein, 9 aa, Homo Sapiens
ISPENHISL

SEQ ID NO: 135942 - protein, 9 aa, Homo Sapiens
ISPEPKTEM

SEQ ID NO: 135943 - protein, 9 aa, Homo Sapiens
ISPETMVAL

SEQ ID NO: 135944 - protein, 9 aa, Homo Sapiens
ISPFHDIPI

SEQ ID NO: 135945 - protein, 9 aa, Homo Sapiens
ISPKVKMAL

SEQ ID NO: 135946 - protein, 9 aa, Homo Sapiens
ISPPPTANL

SEQ ID NO: 135947 - protein, 9 aa, Homo Sapiens
ISPRFDVQL

SEQ ID NO: 135948 - protein, 9 aa, Homo Sapiens
ITPAAFSTL

SEQ ID NO: 135949 - protein, 9 aa, Homo Sapiens
ITPDKVRGL

SEQ ID NO: 135950 - protein, 9 aa, Homo Sapiens
ITPGGFSSV

SEQ ID NO: 135951 - protein, 9 aa, Homo Sapiens
ITPLGSSEL

SEQ ID NO: 135952 - protein, 9 aa, Homo Sapiens
ITPSTQQHL

SEQ ID NO: 135953 - protein, 9 aa, Homo Sapiens
IVAKHTSAL

SEQ ID NO: 135954 - protein, 9 aa, Homo Sapiens
IVPDGTLQL

SEQ ID NO: 135955 - protein, 9 aa, Homo Sapiens
IVPGNVKSL

SEQ ID NO: 135956 - protein, 9 aa, Homo Sapiens
IVPHGYTEV

SEQ ID NO: 135957 - protein, 9 aa, Homo Sapiens
IVPTGKTGL

SEQ ID NO: 135958 - protein, 9 aa, Homo Sapiens
IVTERLVAL

SEQ ID NO: 135959 - protein, 9 aa, Homo Sapiens
KAMEAASSL

SEQ ID NO: 135960 - protein, 9 aa, Homo Sapiens
KAPDFLPLL

SEQ ID NO: 135961 - protein, 9 aa, Homo Sapiens
KAPEMTNEL

SEQ ID NO: 135962 - protein, 9 aa, Homo Sapiens
KAPEPLSSL

SEQ ID NO: 135963 - protein, 9 aa, Homo Sapiens
KAPEPPPAL

SEQ ID NO: 135964 - protein, 9 aa, Homo Sapiens
KAPGFAQML

SEQ ID NO: 135965 - protein, 9 aa, Homo Sapiens
KAPGFRPPL

SEQ ID NO: 135966 - protein, 9 aa, Homo Sapiens
KAPGSTSNL

SEQ ID NO: 135967 - protein, 9 aa, Homo Sapiens
KAPLSKVRL

SEQ ID NO: 135968 - protein, 9 aa, Homo Sapiens
KAPQTPSAL

SEQ ID NO: 135969 - protein, 9 aa, Homo Sapiens
KAPSSNTDL

SEQ ID NO: 135970 - protein, 9 aa, Homo Sapiens
KAPVGPVTM

SEQ ID NO: 135971 - protein, 9 aa, Homo Sapiens
KAPVNTAEL

SEQ ID NO: 135972 - protein, 9 aa, Homo Sapiens
KAPVTKVAA

SEQ ID NO: 135973 - protein, 9 aa, Homo Sapiens
KFHPNGSTL

SEQ ID NO: 135974 - protein, 9 aa, Homo Sapiens
KFWERFIAL

SEQ ID NO: 135975 - protein, 9 aa, Homo Sapiens
KGPPAALTL

SEQ ID NO: 135976 - protein, 9 aa, Homo Sapiens
KIAEGVNSL

SEQ ID NO: 135977 - protein, 9 aa, Homo Sapiens
KIAEKTAAL

SEQ ID NO: 135978 - protein, 9 aa, Homo Sapiens
KIHSSFRSL

SEQ ID NO: 135979 - protein, 9 aa, Homo Sapiens
KIITKAKSL

SEQ ID NO: 135980 - protein, 9 aa, Homo Sapiens
KILDKSQAL

SEQ ID NO: 135981 - protein, 9 aa, Homo Sapiens
KIPDISSFL

SEQ ID NO: 135982 - protein, 9 aa, Homo Sapiens
KIPDKTERL

SEQ ID NO: 135983 - protein, 9 aa, Homo Sapiens
KIPEDQHAL

SEQ ID NO: 135984 - protein, 9 aa, Homo Sapiens
KIPEDVSGL

SEQ ID NO: 135985 - protein, 9 aa, Homo Sapiens
KIPEESKAL

SEQ ID NO: 135986 - protein, 9 aa, Homo Sapiens
KIPTCKITL

SEQ ID NO: 135987 - protein, 9 aa, Homo Sapiens
KIQEAVKAL

SEQ ID NO: 135988 - protein, 9 aa, Homo Sapiens
KLIAKVRCL

SEQ ID NO: 135989 - protein, 9 aa, Homo Sapiens
KLPAFSPLM

SEQ ID NO: 135990 - protein, 9 aa, Homo Sapiens
KLPDGFSQL

SEQ ID NO: 135991 - protein, 9 aa, Homo Sapiens
KLPEKWESV

SEQ ID NO: 135992 - protein, 9 aa, Homo Sapiens
KLPGNISSL

SEQ ID NO: 135993 - protein, 9 aa, Homo Sapiens
KLPGPGSSL

SEQ ID NO: 135994 - protein, 9 aa, Homo Sapiens
KLPKVNKEL

SEQ ID NO: 135995 - protein, 9 aa, Homo Sapiens
KLPTPMQSL

SEQ ID NO: 135996 - protein, 9 aa, Homo Sapiens
KLQASVRCL

SEQ ID NO: 135997 - protein, 9 aa, Homo Sapiens
KSPAITATL

SEQ ID NO: 135998 - protein, 9 aa, Homo Sapiens
KSPEIQRAL

SEQ ID NO: 135999 - protein, 9 aa, Homo Sapiens
KSPGFGLSL

SEQ ID NO: 136000 - protein, 9 aa, Homo Sapiens
KSPGTANVL

SEQ ID NO: 136001 - protein, 9 aa, Homo Sapiens
KSPIAPCSL

SEQ ID NO: 136002 - protein, 9 aa, Homo Sapiens
KSPITRSEM

SEQ ID NO: 136003 - protein, 9 aa, Homo Sapiens
KSPVNTKSL

SEQ ID NO: 136004 - protein, 9 aa, Homo Sapiens
KTAENFRAL

SEQ ID NO: 136005 - protein, 9 aa, Homo Sapiens
KTPFVARSL

SEQ ID NO: 136006 - protein, 9 aa, Homo Sapiens
KTPGPVRGL

SEQ ID NO: 136007 - protein, 9 aa, Homo Sapiens
KTPQGLSNL

SEQ ID NO: 136008 - protein, 9 aa, Homo Sapiens
KVFSTKSSL

SEQ ID NO: 136009 - protein, 9 aa, Homo Sapiens
KVPAGVQEL

SEQ ID NO: 136010 - protein, 9 aa, Homo Sapiens
KVPFIINTL

SEQ ID NO: 136011 - protein, 9 aa, Homo Sapiens
KVPKERLAL

SEQ ID NO: 136012 - protein, 9 aa, Homo Sapiens
KVPTTKSTL

SEQ ID NO: 136013 - protein, 9 aa, Homo Sapiens
KVQAGNSSL

SEQ ID NO: 136014 - protein, 9 aa, Homo Sapiens
KVTELRSEL

SEQ ID NO: 136015 - protein, 9 aa, Homo Sapiens
KWQERKEAL

SEQ ID NO: 136016 - protein, 9 aa, Homo Sapiens
LAPASLTSA

SEQ ID NO: 136017 - protein, 9 aa, Homo Sapiens
LAPASVQTL

SEQ ID NO: 136018 - protein, 9 aa, Homo Sapiens
LAPATVQTV

SEQ ID NO: 136019 - protein, 9 aa, Homo Sapiens
LAPCFQKAL

SEQ ID NO: 136020 - protein, 9 aa, Homo Sapiens
LAPNIISQL

SEQ ID NO: 136021 - protein, 9 aa, Homo Sapiens
LAPNQTKEL

SEQ ID NO: 136022 - protein, 9 aa, Homo Sapiens
LAPPAGATL

SEQ ID NO: 136023 - protein, 9 aa, Homo Sapiens
LAPPAGSVL

SEQ ID NO: 136024 - protein, 9 aa, Homo Sapiens
LAPSASVVL

SEQ ID NO: 136025 - protein, 9 aa, Homo Sapiens
LAPSGDLSL

SEQ ID NO: 136026 - protein, 9 aa, Homo Sapiens
LAPSGFLGL

SEQ ID NO: 136027 - protein, 9 aa, Homo Sapiens
LAPTREIAV

SEQ ID NO: 136028 - protein, 9 aa, Homo Sapiens
LAPVRQQEL

SEQ ID NO: 136029 - protein, 9 aa, Homo Sapiens
LFEDATSAL

SEQ ID NO: 136030 - protein, 9 aa, Homo Sapiens
LFENRLSSL

SEQ ID NO: 136031 - protein, 9 aa, Homo Sapiens
LFEPVINAL

SEQ ID NO: 136032 - protein, 9 aa, Homo Sapiens
LFKEREKPL

SEQ ID NO: 136033 - protein, 9 aa, Homo Sapiens
LFMPRSTEF

SEQ ID NO: 136034 - protein, 9 aa, Homo Sapiens
LGPAALHAL

SEQ ID NO: 136035 - protein, 9 aa, Homo Sapiens
LGPPAAHSL

SEQ ID NO: 136036 - protein, 9 aa, Homo Sapiens
LGPPGTSAL

SEQ ID NO: 136037 - protein, 9 aa, Homo Sapiens
LIPAVGSSL

SEQ ID NO: 136038 - protein, 9 aa, Homo Sapiens
LIPKDYRSL

SEQ ID NO: 136039 - protein, 9 aa, Homo Sapiens
LLLERAKEL

SEQ ID NO: 136040 - protein, 9 aa, Homo Sapiens
LLLTRPVWL

SEQ ID NO: 136041 - protein, 9 aa, Homo Sapiens
LLNSATTSL

SEQ ID NO: 136042 - protein, 9 aa, Homo Sapiens
LLPDEVSTL

SEQ ID NO: 136043 - protein, 9 aa, Homo Sapiens
LLPEHFLFL

SEQ ID NO: 136044 - protein, 9 aa, Homo Sapiens
LLPGNARCL

SEQ ID NO: 136045 - protein, 9 aa, Homo Sapiens
LLPHAVSSL

SEQ ID NO: 136046 - protein, 9 aa, Homo Sapiens
LLPPPMKEL

SEQ ID NO: 136047 - protein, 9 aa, Homo Sapiens
LLPSHASYL

SEQ ID NO: 136048 - protein, 9 aa, Homo Sapiens
LLPVITKEL

SEQ ID NO: 136049 - protein, 9 aa, Homo Sapiens
LMPQVLTTL

SEQ ID NO: 136050 - protein, 9 aa, Homo Sapiens
LSPAPSKTL

SEQ ID NO: 136051 - protein, 9 aa, Homo Sapiens
LSPEARRSL

SEQ ID NO: 136052 - protein, 9 aa, Homo Sapiens
LSPEFFTSV

SEQ ID NO: 136053 - protein, 9 aa, Homo Sapiens
LSPENLQSL

SEQ ID NO: 136054 - protein, 9 aa, Homo Sapiens
LSPGSLTLS

SEQ ID NO: 136055 - protein, 9 aa, Homo Sapiens
LSPITKLSV

SEQ ID NO: 136056 - protein, 9 aa, Homo Sapiens
LSPMSVNAV

SEQ ID NO: 136057 - protein, 9 aa, Homo Sapiens
LSPNTTSSL

SEQ ID NO: 136058 - protein, 9 aa, Homo Sapiens
LSPQRKEAL

SEQ ID NO: 136059 - protein, 9 aa, Homo Sapiens
LSPSSDLTL

SEQ ID NO: 136060 - protein, 9 aa, Homo Sapiens
LSPTPATAL

SEQ ID NO: 136061 - protein, 9 aa, Homo Sapiens
LSPTYELAL

SEQ ID NO: 136062 - protein, 9 aa, Homo Sapiens
LTNQPTLEL

SEQ ID NO: 136063 - protein, 9 aa, Homo Sapiens
LTPPVATEL

SEQ ID NO: 136064 - protein, 9 aa, Homo Sapiens
LVPFSIKPL

SEQ ID NO: 136065 - protein, 9 aa, Homo Sapiens
LVPKRDHAL

SEQ ID NO: 136066 - protein, 9 aa, Homo Sapiens
MAAAAPVAA

SEQ ID NO: 136067 - protein, 9 aa, Homo Sapiens
MAPDISLTL

SEQ ID NO: 136068 - protein, 9 aa, Homo Sapiens
MAPDKQLTL

SEQ ID NO: 136069 - protein, 9 aa, Homo Sapiens
MAPDSSMSM

SEQ ID NO: 136070 - protein, 9 aa, Homo Sapiens
MAPEQKTEL

SEQ ID NO: 136071 - protein, 9 aa, Homo Sapiens
MAPGTVTVV

SEQ ID NO: 136072 - protein, 9 aa, Homo Sapiens
MAPHNPHTL

SEQ ID NO: 136073 - protein, 9 aa, Homo Sapiens
MAPKAWTVL

SEQ ID NO: 136074 - protein, 9 aa, Homo Sapiens
MAPLKMLAL

SEQ ID NO: 136075 - protein, 9 aa, Homo Sapiens
MAPPSASCL

SEQ ID NO: 136076 - protein, 9 aa, Homo Sapiens
MAPQNLSTF

SEQ ID NO: 136077 - protein, 9 aa, Homo Sapiens
MAPRTGKSL

SEQ ID NO: 136078 - protein, 9 aa, Homo Sapiens
MAPSGSLAV

SEQ ID NO: 136079 - protein, 9 aa, Homo Sapiens
MAPSIMKSL

SEQ ID NO: 136080 - protein, 9 aa, Homo Sapiens
MAPSKETEM

SEQ ID NO: 136081 - protein, 9 aa, Homo Sapiens
MAPVASIWL

SEQ ID NO: 136082 - protein, 9 aa, Homo Sapiens
MAPYGPLAA

SEQ ID NO: 136083 - protein, 9 aa, Homo Sapiens
MFCEKAMEL

SEQ ID NO: 136084 - protein, 9 aa, Homo Sapiens
MGPAARPAL

SEQ ID NO: 136085 - protein, 9 aa, Homo Sapiens
MGPAGAKNL

SEQ ID NO: 136086 - protein, 9 aa, Homo Sapiens
MIPLLLAAL

SEQ ID NO: 136087 - protein, 9 aa, Homo Sapiens
MIQNSRPSL

SEQ ID NO: 136088 - protein, 9 aa, Homo Sapiens
MLIEQARAL

SEQ ID NO: 136089 - protein, 9 aa, Homo Sapiens
MLPEKLRPL

SEQ ID NO: 136090 - protein, 9 aa, Homo Sapiens
MLPELKSTL

SEQ ID NO: 136091 - protein, 9 aa, Homo Sapiens
MLPMKVRAL

SEQ ID NO: 136092 - protein, 9 aa, Homo Sapiens
MMPDGTLGL

SEQ ID NO: 136093 - protein, 9 aa, Homo Sapiens
MSPDVKNSI

SEQ ID NO: 136094 - protein, 9 aa, Homo Sapiens
MSPIPAHSL

SEQ ID NO: 136095 - protein, 9 aa, Homo Sapiens
MSPKAQRPL

SEQ ID NO: 136096 - protein, 9 aa, Homo Sapiens
MSPLSETEM

SEQ ID NO: 136097 - protein, 9 aa, Homo Sapiens
MSPLSNNSL

SEQ ID NO: 136098 - protein, 9 aa, Homo Sapiens
MSPMAERSM

SEQ ID NO: 136099 - protein, 9 aa, Homo Sapiens
MSPPPAKKL

SEQ ID NO: 136100 - protein, 9 aa, Homo Sapiens
MSPSGRLCL

SEQ ID NO: 136101 - protein, 9 aa, Homo Sapiens
MTPLRALAL

SEQ ID NO: 136102 - protein, 9 aa, Homo Sapiens
MTPSAKQSL

SEQ ID NO: 136103 - protein, 9 aa, Homo Sapiens
MTPTRELAL

SEQ ID NO: 136104 - protein, 9 aa, Homo Sapiens
MVADKFTEL

SEQ ID NO: 136105 - protein, 9 aa, Homo Sapiens
MVADRFSEL

SEQ ID NO: 136106 - protein, 9 aa, Homo Sapiens
NAAERRGPL

SEQ ID NO: 136107 - protein, 9 aa, Homo Sapiens
NAAIAKQAL

SEQ ID NO: 136108 - protein, 9 aa, Homo Sapiens
NAIPVDTVL

SEQ ID NO: 136109 - protein, 9 aa, Homo Sapiens
NAPAAISFL

SEQ ID NO: 136110 - protein, 9 aa, Homo Sapiens
NAPEANRGL

SEQ ID NO: 136111 - protein, 9 aa, Homo Sapiens
NAPEQACHL

SEQ ID NO: 136112 - protein, 9 aa, Homo Sapiens
NAPGYGPII

SEQ ID NO: 136113 - protein, 9 aa, Homo Sapiens
NAPLFIRAV

SEQ ID NO: 136114 - protein, 9 aa, Homo Sapiens
NAPMTLEEF

SEQ ID NO: 136115 - protein, 9 aa, Homo Sapiens
NAPPSFGTL

SEQ ID NO: 136116 - protein, 9 aa, Homo Sapiens
NAPSHPRAL

SEQ ID NO: 136117 - protein, 9 aa, Homo Sapiens
NFQTAKESL

SEQ ID NO: 136118 - protein, 9 aa, Homo Sapiens
NGPGTPRPL

SEQ ID NO: 136119 - protein, 9 aa, Homo Sapiens
NGPILNVLV

SEQ ID NO: 136120 - protein, 9 aa, Homo Sapiens
NGPVSHSSL

SEQ ID NO: 136121 - protein, 9 aa, Homo Sapiens
NIPAGKPSL

SEQ ID NO: 136122 - protein, 9 aa, Homo Sapiens
NIPDMLQSL

SEQ ID NO: 136123 - protein, 9 aa, Homo Sapiens
NIPGEYRCL

SEQ ID NO: 136124 - protein, 9 aa, Homo Sapiens
NIPTWLTEL

SEQ ID NO: 136125 - protein, 9 aa, Homo Sapiens
NLPEETNEL

SEQ ID NO: 136126 - protein, 9 aa, Homo Sapiens
NLPERSVPL

SEQ ID NO: 136127 - protein, 9 aa, Homo Sapiens
NLPKARAAL

SEQ ID NO: 136128 - protein, 9 aa, Homo Sapiens
NLPSTGGSL

SEQ ID NO: 136129 - protein, 9 aa, Homo Sapiens
NMPLTISSL

SEQ ID NO: 136130 - protein, 9 aa, Homo Sapiens
NRPGTVSSL

SEQ ID NO: 136131 - protein, 9 aa, Homo Sapiens
NSPASLVGL

SEQ ID NO: 136132 - protein, 9 aa, Homo Sapiens
NSPEKACSL

SEQ ID NO: 136133 - protein, 9 aa, Homo Sapiens
NSPFQVTAL

SEQ ID NO: 136134 - protein, 9 aa, Homo Sapiens
NSPGTYQEL

SEQ ID NO: 136135 - protein, 9 aa, Homo Sapiens
NSPIRSSAF

SEQ ID NO: 136136 - protein, 9 aa, Homo Sapiens
NSPLPGSEL

SEQ ID NO: 136137 - protein, 9 aa, Homo Sapiens
NSPLRENSF

SEQ ID NO: 136138 - protein, 9 aa, Homo Sapiens
NSPLVRRTL

SEQ ID NO: 136139 - protein, 9 aa, Homo Sapiens
NSPSCTREL

SEQ ID NO: 136140 - protein, 9 aa, Homo Sapiens
NSPSFCTSL

SEQ ID NO: 136141 - protein, 9 aa, Homo Sapiens
NSPTNISSL

SEQ ID NO: 136142 - protein, 9 aa, Homo Sapiens
NTPEDVQAL

SEQ ID NO: 136143 - protein, 9 aa, Homo Sapiens
NTPENLHEM

SEQ ID NO: 136144 - protein, 9 aa, Homo Sapiens
NTPVVKSAL

SEQ ID NO: 136145 - protein, 9 aa, Homo Sapiens
NVPAAGSHL

SEQ ID NO: 136146 - protein, 9 aa, Homo Sapiens
NVPDGTGAL

SEQ ID NO: 136147 - protein, 9 aa, Homo Sapiens
NVPEAASTL

SEQ ID NO: 136148 - protein, 9 aa, Homo Sapiens
PAPGPHPAL

SEQ ID NO: 136149 - protein, 9 aa, Homo Sapiens
PAYHSSLMD

SEQ ID NO: 136150 - protein, 9 aa, Homo Sapiens
PDDTEAALL

SEQ ID NO: 136151 - protein, 9 aa, Homo Sapiens
PMSESTLSI

SEQ ID NO: 136152 - protein, 9 aa, Homo Sapiens
PRHSQSLTM

SEQ ID NO: 136153 - protein, 9 aa, Homo Sapiens
PSIVHRKCF

SEQ ID NO: 136154 - protein, 9 aa, Homo Sapiens
QAPAAVVEL

SEQ ID NO: 136155 - protein, 9 aa, Homo Sapiens
QAPDGMQSL

SEQ ID NO: 136156 - protein, 9 aa, Homo Sapiens
QAPSGRAPL

SEQ ID NO: 136157 - protein, 9 aa, Homo Sapiens
QAPVAAHTV

SEQ ID NO: 136158 - protein, 9 aa, Homo Sapiens
QFLPRTITL

SEQ ID NO: 136159 - protein, 9 aa, Homo Sapiens
QGPDGRLEL

SEQ ID NO: 136160 - protein, 9 aa, Homo Sapiens
QGPGGASEL

SEQ ID NO: 136161 - protein, 9 aa, Homo Sapiens
QGPPVTPVL

SEQ ID NO: 136162 - protein, 9 aa, Homo Sapiens
QIAVGFLEL

SEQ ID NO: 136163 - protein, 9 aa, Homo Sapiens
QIPEIKQTL

SEQ ID NO: 136164 - protein, 9 aa, Homo Sapiens
QIPVDLSEL

SEQ ID NO: 136165 - protein, 9 aa, Homo Sapiens
QLIPKRSAL

SEQ ID NO: 136166 - protein, 9 aa, Homo Sapiens
QLPEGASAV

SEQ ID NO: 136167 - protein, 9 aa, Homo Sapiens
QLPSGWASI

SEQ ID NO: 136168 - protein, 9 aa, Homo Sapiens
QSPASLSSL

SEQ ID NO: 136169 - protein, 9 aa, Homo Sapiens
QSPDGVLDL

SEQ ID NO: 136170 - protein, 9 aa, Homo Sapiens
QSPEGMISL

SEQ ID NO: 136171 - protein, 9 aa, Homo Sapiens
QSPFFPVVL

SEQ ID NO: 136172 - protein, 9 aa, Homo Sapiens
QSPQTLLEL

SEQ ID NO: 136173 - protein, 9 aa, Homo Sapiens
QTIGARKEL

SEQ ID NO: 136174 - protein, 9 aa, Homo Sapiens
QTPDGVHCL

SEQ ID NO: 136175 - protein, 9 aa, Homo Sapiens
QTPDIKVSL

SEQ ID NO: 136176 - protein, 9 aa, Homo Sapiens
QTPGHTEEL

SEQ ID NO: 136177 - protein, 9 aa, Homo Sapiens
QTPLALRSL

SEQ ID NO: 136178 - protein, 9 aa, Homo Sapiens
QTPVGVSTL

SEQ ID NO: 136179 - protein, 9 aa, Homo Sapiens
QVIEKTKSL

SEQ ID NO: 136180 - protein, 9 aa, Homo Sapiens
QVNDLTTAL

SEQ ID NO: 136181 - protein, 9 aa, Homo Sapiens
QVNGAATEL

SEQ ID NO: 136182 - protein, 9 aa, Homo Sapiens
QVPVVMTSL

SEQ ID NO: 136183 - protein, 9 aa, Homo Sapiens
RAALRSCSL

SEQ ID NO: 136184 - protein, 9 aa, Homo Sapiens
RAPAAGESL

SEQ ID NO: 136185 - protein, 9 aa, Homo Sapiens
RAPASAEAM

SEQ ID NO: 136186 - protein, 9 aa, Homo Sapiens
RAPDVARAL

SEQ ID NO: 136187 - protein, 9 aa, Homo Sapiens
RAPEAQQTL

SEQ ID NO: 136188 - protein, 9 aa, Homo Sapiens
RAPEEVHAL

SEQ ID NO: 136189 - protein, 9 aa, Homo Sapiens
RAPEFLQTL

SEQ ID NO: 136190 - protein, 9 aa, Homo Sapiens
RAPEGQLPA

SEQ ID NO: 136191 - protein, 9 aa, Homo Sapiens
RAPGPWQAM

SEQ ID NO: 136192 - protein, 9 aa, Homo Sapiens
RAPVPASEL

SEQ ID NO: 136193 - protein, 9 aa, Homo Sapiens
RAPWTSTSV

SEQ ID NO: 136194 - protein, 9 aa, Homo Sapiens
RGPGPRSSL

SEQ ID NO: 136195 - protein, 9 aa, Homo Sapiens
RIAEFTTNL

SEQ ID NO: 136196 - protein, 9 aa, Homo Sapiens
RIMEFTTTL

SEQ ID NO: 136197 - protein, 9 aa, Homo Sapiens
RIPAYFVTV

SEQ ID NO: 136198 - protein, 9 aa, Homo Sapiens
RIPDQLGYL

SEQ ID NO: 136199 - protein, 9 aa, Homo Sapiens
RIPSAFRHL

SEQ ID NO: 136200 - protein, 9 aa, Homo Sapiens
RIPSFVTEL

SEQ ID NO: 136201 - protein, 9 aa, Homo Sapiens
RIPVHSSAL

SEQ ID NO: 136202 - protein, 9 aa, Homo Sapiens
RIQEELSAL

SEQ ID NO: 136203 - protein, 9 aa, Homo Sapiens
RLIKDTLAL

SEQ ID NO: 136204 - protein, 9 aa, Homo Sapiens
RLINQVLEL

SEQ ID NO: 136205 - protein, 9 aa, Homo Sapiens
RLPAWQPIL

SEQ ID NO: 136206 - protein, 9 aa, Homo Sapiens
RLPCSFATL

SEQ ID NO: 136207 - protein, 9 aa, Homo Sapiens
RLPDGFTQL

SEQ ID NO: 136208 - protein, 9 aa, Homo Sapiens
RLPEELRSL

SEQ ID NO: 136209 - protein, 9 aa, Homo Sapiens
RLPERMTTL

SEQ ID NO: 136210 - protein, 9 aa, Homo Sapiens
RLPESNQTL

SEQ ID NO: 136211 - protein, 9 aa, Homo Sapiens
RLPGRSTSL

SEQ ID NO: 136212 - protein, 9 aa, Homo Sapiens
RLPHSTAAL

SEQ ID NO: 136213 - protein, 9 aa, Homo Sapiens
RLPPKVESL

SEQ ID NO: 136214 - protein, 9 aa, Homo Sapiens
RLPPLLSPL

SEQ ID NO: 136215 - protein, 9 aa, Homo Sapiens
RLPPYSSQL

SEQ ID NO: 136216 - protein, 9 aa, Homo Sapiens
RLPSEVSAL

SEQ ID NO: 136217 - protein, 9 aa, Homo Sapiens
RLPSRVLEL

SEQ ID NO: 136218 - protein, 9 aa, Homo Sapiens
RLPTSKRSL

SEQ ID NO: 136219 - protein, 9 aa, Homo Sapiens
RLPVNVREL

SEQ ID NO: 136220 - protein, 9 aa, Homo Sapiens
RMPDCSVAL

SEQ ID NO: 136221 - protein, 9 aa, Homo Sapiens
RNPPAFTEL

SEQ ID NO: 136222 - protein, 9 aa, Homo Sapiens
RQPAKVAAL

SEQ ID NO: 136223 - protein, 9 aa, Homo Sapiens
RQPYAVSEL

SEQ ID NO: 136224 - protein, 9 aa, Homo Sapiens
RSPEEVTEL

SEQ ID NO: 136225 - protein, 9 aa, Homo Sapiens
RSPGRAYAL

SEQ ID NO: 136226 - protein, 9 aa, Homo Sapiens
RSPPPGMGL

SEQ ID NO: 136227 - protein, 9 aa, Homo Sapiens
RSPSWQTAM

SEQ ID NO: 136228 - protein, 9 aa, Homo Sapiens
RSPVVHSVL

SEQ ID NO: 136229 - protein, 9 aa, Homo Sapiens
RTPAAVREL

SEQ ID NO: 136230 - protein, 9 aa, Homo Sapiens
RTPLHEIAL

SEQ ID NO: 136231 - protein, 9 aa, Homo Sapiens
RTPSDVKEL

SEQ ID NO: 136232 - protein, 9 aa, Homo Sapiens
RTPSSSSTL

SEQ ID NO: 136233 - protein, 9 aa, Homo Sapiens
RVEERLSAL

SEQ ID NO: 136234 - protein, 9 aa, Homo Sapiens
RVIDLRAEL

SEQ ID NO: 136235 - protein, 9 aa, Homo Sapiens
RVNSTMTTL

SEQ ID NO: 136236 - protein, 9 aa, Homo Sapiens
RVPLASQGL

SEQ ID NO: 136237 - protein, 9 aa, Homo Sapiens
RVPRNIKSL

SEQ ID NO: 136238 - protein, 9 aa, Homo Sapiens
RVPSAGSSL

SEQ ID NO: 136239 - protein, 9 aa, Homo Sapiens
RVPTANVSV

SEQ ID NO: 136240 - protein, 9 aa, Homo Sapiens
RVPYRDSKL

SEQ ID NO: 136241 - protein, 9 aa, Homo Sapiens
SAAQRLTAL

SEQ ID NO: 136242 - protein, 9 aa, Homo Sapiens
SANFSYNAL

SEQ ID NO: 136243 - protein, 9 aa, Homo Sapiens
SANYTEIAL

SEQ ID NO: 136244 - protein, 9 aa, Homo Sapiens
SAPAAAAGL

SEQ ID NO: 136245 - protein, 9 aa, Homo Sapiens
SAPARQAVL

SEQ ID NO: 136246 - protein, 9 aa, Homo Sapiens
SAPASQASL

SEQ ID NO: 136247 - protein, 9 aa, Homo Sapiens
SAPASTTAV

SEQ ID NO: 136248 - protein, 9 aa, Homo Sapiens
SAPDFQQSL

SEQ ID NO: 136249 - protein, 9 aa, Homo Sapiens
SAPDKSLEL

SEQ ID NO: 136250 - protein, 9 aa, Homo Sapiens
SAPDMRVAL

SEQ ID NO: 136251 - protein, 9 aa, Homo Sapiens
SAPDNVLEV

SEQ ID NO: 136252 - protein, 9 aa, Homo Sapiens
SAPDPHQQL

SEQ ID NO: 136253 - protein, 9 aa, Homo Sapiens
SAPDPVSTL

SEQ ID NO: 136254 - protein, 9 aa, Homo Sapiens
SAPFLASAV

SEQ ID NO: 136255 - protein, 9 aa, Homo Sapiens
SAPGIISAL

SEQ ID NO: 136256 - protein, 9 aa, Homo Sapiens
SAPGPAQAM

SEQ ID NO: 136257 - protein, 9 aa, Homo Sapiens
SAPGPGLLL

SEQ ID NO: 136258 - protein, 9 aa, Homo Sapiens
SAPGTLKTL

SEQ ID NO: 136259 - protein, 9 aa, Homo Sapiens
SAPGTTMFL

SEQ ID NO: 136260 - protein, 9 aa, Homo Sapiens
SAPIFTTSL

SEQ ID NO: 136261 - protein, 9 aa, Homo Sapiens
SAPKYIDYL

SEQ ID NO: 136262 - protein, 9 aa, Homo Sapiens
SAPLGKMSL

SEQ ID NO: 136263 - protein, 9 aa, Homo Sapiens
SAPLLVNAM

SEQ ID NO: 136264 - protein, 9 aa, Homo Sapiens
SAPLPQSTL

SEQ ID NO: 136265 - protein, 9 aa, Homo Sapiens
SAPMTTNGL

SEQ ID NO: 136266 - protein, 9 aa, Homo Sapiens
SAPNSPMAL

SEQ ID NO: 136267 - protein, 9 aa, Homo Sapiens
SAPRPTRFL

SEQ ID NO: 136268 - protein, 9 aa, Homo Sapiens
SAPSADAPM

SEQ ID NO: 136269 - protein, 9 aa, Homo Sapiens
SAPSASVGL

SEQ ID NO: 136270 - protein, 9 aa, Homo Sapiens
SAPSNVTSL

SEQ ID NO: 136271 - protein, 9 aa, Homo Sapiens
SAPSRVQAL

SEQ ID NO: 136272 - protein, 9 aa, Homo Sapiens
SAPSSDKPL

SEQ ID NO: 136273 - protein, 9 aa, Homo Sapiens
SAPSSQARL

SEQ ID NO: 136274 - protein, 9 aa, Homo Sapiens
SAPSTQQVL

SEQ ID NO: 136275 - protein, 9 aa, Homo Sapiens
SAPTAIKAA

SEQ ID NO: 136276 - protein, 9 aa, Homo Sapiens
SAPTETHSL

SEQ ID NO: 136277 - protein, 9 aa, Homo Sapiens
SAPTIATYL

SEQ ID NO: 136278 - protein, 9 aa, Homo Sapiens
SAPTPIQAL

SEQ ID NO: 136279 - protein, 9 aa, Homo Sapiens
SAPTVRNAM

SEQ ID NO: 136280 - protein, 9 aa, Homo Sapiens
SAPVNFISA

SEQ ID NO: 136281 - protein, 9 aa, Homo Sapiens
SAPVPASPL

SEQ ID NO: 136282 - protein, 9 aa, Homo Sapiens
SAPVPASTL

SEQ ID NO: 136283 - protein, 9 aa, Homo Sapiens
SAPVPFTVL

SEQ ID NO: 136284 - protein, 9 aa, Homo Sapiens
SAPVSVSAV

SEQ ID NO: 136285 - protein, 9 aa, Homo Sapiens
SFEPTTVEL

SEQ ID NO: 136286 - protein, 9 aa, Homo Sapiens
SFPHPLPSL

SEQ ID NO: 136287 - protein, 9 aa, Homo Sapiens
SFQPTVVSL

SEQ ID NO: 136288 - protein, 9 aa, Homo Sapiens
SFSPGNSSL

SEQ ID NO: 136289 - protein, 9 aa, Homo Sapiens
SGPAAAATL

SEQ ID NO: 136290 - protein, 9 aa, Homo Sapiens
SGPAPRCEL

SEQ ID NO: 136291 - protein, 9 aa, Homo Sapiens
SGPASGHAL

SEQ ID NO: 136292 - protein, 9 aa, Homo Sapiens
SGPERILSI

SEQ ID NO: 136293 - protein, 9 aa, Homo Sapiens
SGPGPAAAL

SEQ ID NO: 136294 - protein, 9 aa, Homo Sapiens
SGPRPGLSL

SEQ ID NO: 136295 - protein, 9 aa, Homo Sapiens
SGPVAANVL

SEQ ID NO: 136296 - protein, 9 aa, Homo Sapiens
SGPVPGTAI

SEQ ID NO: 136297 - protein, 9 aa, Homo Sapiens
SIAEQAHEL

SEQ ID NO: 136298 - protein, 9 aa, Homo Sapiens
SIAKQTSSL

SEQ ID NO: 136299 - protein, 9 aa, Homo Sapiens
SIFASGSEL

SEQ ID NO: 136300 - protein, 9 aa, Homo Sapiens
SIFSGAASL

SEQ ID NO: 136301 - protein, 9 aa, Homo Sapiens
SILTTHTTL

SEQ ID NO: 136302 - protein, 9 aa, Homo Sapiens
SINGDLMEL

SEQ ID NO: 136303 - protein, 9 aa, Homo Sapiens
SINQTTLEL

SEQ ID NO: 136304 - protein, 9 aa, Homo Sapiens
SIPAFLSSL

SEQ ID NO: 136305 - protein, 9 aa, Homo Sapiens
SIPALTATL

SEQ ID NO: 136306 - protein, 9 aa, Homo Sapiens
SIPDFPMHL

SEQ ID NO: 136307 - protein, 9 aa, Homo Sapiens
SIPDIKTAF

SEQ ID NO: 136308 - protein, 9 aa, Homo Sapiens
SIPDVNVNL

SEQ ID NO: 136309 - protein, 9 aa, Homo Sapiens
SIPERPAQL

SEQ ID NO: 136310 - protein, 9 aa, Homo Sapiens
SIPLAFACL

SEQ ID NO: 136311 - protein, 9 aa, Homo Sapiens
SIPLANESL

SEQ ID NO: 136312 - protein, 9 aa, Homo Sapiens
SIPTKALEL

SEQ ID NO: 136313 - protein, 9 aa, Homo Sapiens
SIQTSVNAL

SEQ ID NO: 136314 - protein, 9 aa, Homo Sapiens
SISSPVLSL

SEQ ID NO: 136315 - protein, 9 aa, Homo Sapiens
SITATTQAL

SEQ ID NO: 136316 - protein, 9 aa, Homo Sapiens
SLIEQTTAL

SEQ ID NO: 136317 - protein, 9 aa, Homo Sapiens
SLPAEVGCL

SEQ ID NO: 136318 - protein, 9 aa, Homo Sapiens
SLPAEVHSL

SEQ ID NO: 136319 - protein, 9 aa, Homo Sapiens
SLPAPSKAL

SEQ ID NO: 136320 - protein, 9 aa, Homo Sapiens
SLPDGGSCL

SEQ ID NO: 136321 - protein, 9 aa, Homo Sapiens
SLPDIKVYL

SEQ ID NO: 136322 - protein, 9 aa, Homo Sapiens
SLPENYKQL

SEQ ID NO: 136323 - protein, 9 aa, Homo Sapiens
SLPGPRKPL

SEQ ID NO: 136324 - protein, 9 aa, Homo Sapiens
SLPIATQEL

SEQ ID NO: 136325 - protein, 9 aa, Homo Sapiens
SLPNGTASL

SEQ ID NO: 136326 - protein, 9 aa, Homo Sapiens
SLPNVFSAL

SEQ ID NO: 136327 - protein, 9 aa, Homo Sapiens
SLPRDRQAL

SEQ ID NO: 136328 - protein, 9 aa, Homo Sapiens
SLPSYVSVL

SEQ ID NO: 136329 - protein, 9 aa, Homo Sapiens
SLVTGITAL

SEQ ID NO: 136330 - protein, 9 aa, Homo Sapiens
SMITGVAAL

SEQ ID NO: 136331 - protein, 9 aa, Homo Sapiens
SMNTASHSL

SEQ ID NO: 136332 - protein, 9 aa, Homo Sapiens
SMPEFMANL

SEQ ID NO: 136333 - protein, 9 aa, Homo Sapiens
SMPWNVDTL

SEQ ID NO: 136334 - protein, 9 aa, Homo Sapiens
SMPYHVCTL

SEQ ID NO: 136335 - protein, 9 aa, Homo Sapiens
SPLPAGNAL

SEQ ID NO: 136336 - protein, 9 aa, Homo Sapiens
SSLPAGAAL

SEQ ID NO: 136337 - protein, 9 aa, Homo Sapiens
SSLPVGPVL

SEQ ID NO: 136338 - protein, 9 aa, Homo Sapiens
SSPATESAL

SEQ ID NO: 136339 - protein, 9 aa, Homo Sapiens
SSPEFSKTL

SEQ ID NO: 136340 - protein, 9 aa, Homo Sapiens
SSPEKAASL

SEQ ID NO: 136341 - protein, 9 aa, Homo Sapiens
SSPERDFPL

SEQ ID NO: 136342 - protein, 9 aa, Homo Sapiens
SSPGAVAGL

SEQ ID NO: 136343 - protein, 9 aa, Homo Sapiens
SSPGHGSPL

SEQ ID NO: 136344 - protein, 9 aa, Homo Sapiens
SSPLKSHPL

SEQ ID NO: 136345 - protein, 9 aa, Homo Sapiens
SSPLRKQEL

SEQ ID NO: 136346 - protein, 9 aa, Homo Sapiens
SSPLVVVSV

SEQ ID NO: 136347 - protein, 9 aa, Homo Sapiens
SSPMATTAA

SEQ ID NO: 136348 - protein, 9 aa, Homo Sapiens
SSPPLRHAV

SEQ ID NO: 136349 - protein, 9 aa, Homo Sapiens
SSPPPHPQL

SEQ ID NO: 136350 - protein, 9 aa, Homo Sapiens
SSPQAGSSL

SEQ ID NO: 136351 - protein, 9 aa, Homo Sapiens
SSPSSKTSF

SEQ ID NO: 136352 - protein, 9 aa, Homo Sapiens
SSPSSLRAL

SEQ ID NO: 136353 - protein, 9 aa, Homo Sapiens
SSPSYENSL

SEQ ID NO: 136354 - protein, 9 aa, Homo Sapiens
SSPTFLRAL

SEQ ID NO: 136355 - protein, 9 aa, Homo Sapiens
SSPTVNTTL

SEQ ID NO: 136356 - protein, 9 aa, Homo Sapiens
SSPVADIAV

SEQ ID NO: 136357 - protein, 9 aa, Homo Sapiens
SSPVSMVHL

SEQ ID NO: 136358 - protein, 9 aa, Homo Sapiens
SSPVTNQAI

SEQ ID NO: 136359 - protein, 9 aa, Homo Sapiens
SSPVTVHTL

SEQ ID NO: 136360 - protein, 9 aa, Homo Sapiens
SSPVVATTM

SEQ ID NO: 136361 - protein, 9 aa, Homo Sapiens
SSPVVHQSL

SEQ ID NO: 136362 - protein, 9 aa, Homo Sapiens
SSPYSPAYL

SEQ ID NO: 136363 - protein, 9 aa, Homo Sapiens
SSPYSTDTL

SEQ ID NO: 136364 - protein, 9 aa, Homo Sapiens
STAIREISL

SEQ ID NO: 136365 - protein, 9 aa, Homo Sapiens
STPDHTSTL

SEQ ID NO: 136366 - protein, 9 aa, Homo Sapiens
STPEYTVEL

SEQ ID NO: 136367 - protein, 9 aa, Homo Sapiens
STPSGYLEL

SEQ ID NO: 136368 - protein, 9 aa, Homo Sapiens
STPSPTSSL

SEQ ID NO: 136369 - protein, 9 aa, Homo Sapiens
STPTGYGTL

SEQ ID NO: 136370 - protein, 9 aa, Homo Sapiens
SVECATQAL

SEQ ID NO: 136371 - protein, 9 aa, Homo Sapiens
SVIPDREYL

SEQ ID NO: 136372 - protein, 9 aa, Homo Sapiens
SVIQHTNSL

SEQ ID NO: 136373 - protein, 9 aa, Homo Sapiens
SVLAAANSV

SEQ ID NO: 136374 - protein, 9 aa, Homo Sapiens
SVPAFASSL

SEQ ID NO: 136375 - protein, 9 aa, Homo Sapiens
SVPAPTNVL

SEQ ID NO: 136376 - protein, 9 aa, Homo Sapiens
SVPDSVTPL

SEQ ID NO: 136377 - protein, 9 aa, Homo Sapiens
SVPDVTHHL

SEQ ID NO: 136378 - protein, 9 aa, Homo Sapiens
SVPFAATAT

SEQ ID NO: 136379 - protein, 9 aa, Homo Sapiens
SVPIQANAL

SEQ ID NO: 136380 - protein, 9 aa, Homo Sapiens
SVPLSALEL

SEQ ID NO: 136381 - protein, 9 aa, Homo Sapiens
SVPNKALEL

SEQ ID NO: 136382 - protein, 9 aa, Homo Sapiens
SVPNVHGAL

SEQ ID NO: 136383 - protein, 9 aa, Homo Sapiens
SVPPYGVAL

SEQ ID NO: 136384 - protein, 9 aa, Homo Sapiens
SVPQALTGL

SEQ ID NO: 136385 - protein, 9 aa, Homo Sapiens
SVPSAKVSL

SEQ ID NO: 136386 - protein, 9 aa, Homo Sapiens
SVPSAVSSL

SEQ ID NO: 136387 - protein, 9 aa, Homo Sapiens
SVPTDYSYL

SEQ ID NO: 136388 - protein, 9 aa, Homo Sapiens
SVPTLRSEL

SEQ ID NO: 136389 - protein, 9 aa, Homo Sapiens
SVPVAFSHF

SEQ ID NO: 136390 - protein, 9 aa, Homo Sapiens
SVPVATVEL

SEQ ID NO: 136391 - protein, 9 aa, Homo Sapiens
SVPVPATEL

SEQ ID NO: 136392 - protein, 9 aa, Homo Sapiens
SVPVSLQTL

SEQ ID NO: 136393 - protein, 9 aa, Homo Sapiens
SVPVTKTNL

SEQ ID NO: 136394 - protein, 9 aa, Homo Sapiens
SVPYHQAAL

SEQ ID NO: 136395 - protein, 9 aa, Homo Sapiens
SVPYPTASL

SEQ ID NO: 136396 - protein, 9 aa, Homo Sapiens
SVQRADTSL

SEQ ID NO: 136397 - protein, 9 aa, Homo Sapiens
SVQSGNLAL

SEQ ID NO: 136398 - protein, 9 aa, Homo Sapiens
SVQSSERPL

SEQ ID NO: 136399 - protein, 9 aa, Homo Sapiens
SVSGKVSCL

SEQ ID NO: 136400 - protein, 9 aa, Homo Sapiens
TAPATEQTL

SEQ ID NO: 136401 - protein, 9 aa, Homo Sapiens
TAPGFTAEM

SEQ ID NO: 136402 - protein, 9 aa, Homo Sapiens
TAPIPGATL

SEQ ID NO: 136403 - protein, 9 aa, Homo Sapiens
TAPIRSPAL

SEQ ID NO: 136404 - protein, 9 aa, Homo Sapiens
TAPLAICSL

SEQ ID NO: 136405 - protein, 9 aa, Homo Sapiens
TAPLSDAVL

SEQ ID NO: 136406 - protein, 9 aa, Homo Sapiens
TAPLTLESL

SEQ ID NO: 136407 - protein, 9 aa, Homo Sapiens
TAPNTFKTL

SEQ ID NO: 136408 - protein, 9 aa, Homo Sapiens
TAPQAEHAM

SEQ ID NO: 136409 - protein, 9 aa, Homo Sapiens
TAPQGNVDL

SEQ ID NO: 136410 - protein, 9 aa, Homo Sapiens
TAPQPGSAV

SEQ ID NO: 136411 - protein, 9 aa, Homo Sapiens
TAPSALHTL

SEQ ID NO: 136412 - protein, 9 aa, Homo Sapiens
TAPSMASVL

SEQ ID NO: 136413 - protein, 9 aa, Homo Sapiens
TAPVPTTEI

SEQ ID NO: 136414 - protein, 9 aa, Homo Sapiens
TAPVSEVSI

SEQ ID NO: 136415 - protein, 9 aa, Homo Sapiens
TAPYSLETL

SEQ ID NO: 136416 - protein, 9 aa, Homo Sapiens
TFKESIVSL

SEQ ID NO: 136417 - protein, 9 aa, Homo Sapiens
TFNEDVQAL

SEQ ID NO: 136418 - protein, 9 aa, Homo Sapiens
TFVPAMTAI

SEQ ID NO: 136419 - protein, 9 aa, Homo Sapiens
TGPDVVKSV

SEQ ID NO: 136420 - protein, 9 aa, Homo Sapiens
TGPITGLAL

SEQ ID NO: 136421 - protein, 9 aa, Homo Sapiens
TGPPAMKSL

SEQ ID NO: 136422 - protein, 9 aa, Homo Sapiens
TIFGKAHSL

SEQ ID NO: 136423 - protein, 9 aa, Homo Sapiens
TIIDKSKSV

SEQ ID NO: 136424 - protein, 9 aa, Homo Sapiens
TIIEATHVL

SEQ ID NO: 136425 - protein, 9 aa, Homo Sapiens
TIIPKVLAM

SEQ ID NO: 136426 - protein, 9 aa, Homo Sapiens
TILDKAMVL

SEQ ID NO: 136427 - protein, 9 aa, Homo Sapiens
TILDNRKEL

SEQ ID NO: 136428 - protein, 9 aa, Homo Sapiens
TINGHNAEV

SEQ ID NO: 136429 - protein, 9 aa, Homo Sapiens
TIPDWLQAI

SEQ ID NO: 136430 - protein, 9 aa, Homo Sapiens
TIPGGTPSL

SEQ ID NO: 136431 - protein, 9 aa, Homo Sapiens
TIPSQILEV

SEQ ID NO: 136432 - protein, 9 aa, Homo Sapiens
TIPVVHASI

SEQ ID NO: 136433 - protein, 9 aa, Homo Sapiens
TIQGAANAL

SEQ ID NO: 136434 - protein, 9 aa, Homo Sapiens
TLHEQASAL

SEQ ID NO: 136435 - protein, 9 aa, Homo Sapiens
TLPDWKRSL

SEQ ID NO: 136436 - protein, 9 aa, Homo Sapiens
TLPGPGASL

SEQ ID NO: 136437 - protein, 9 aa, Homo Sapiens
TLPHEILEM

SEQ ID NO: 136438 - protein, 9 aa, Homo Sapiens
TLPTVIAEL

SEQ ID NO: 136439 - protein, 9 aa, Homo Sapiens
TMPPVGTDL

SEQ ID NO: 136440 - protein, 9 aa, Homo Sapiens
TMPSDVLEV

SEQ ID NO: 136441 - protein, 9 aa, Homo Sapiens
TMPTDVLEV

SEQ ID NO: 136442 - protein, 9 aa, Homo Sapiens
TMSGVTTCL

SEQ ID NO: 136443 - protein, 9 aa, Homo Sapiens
TSAPKGSVL

SEQ ID NO: 136444 - protein, 9 aa, Homo Sapiens
TSPAVGSIL

SEQ ID NO: 136445 - protein, 9 aa, Homo Sapiens
TSPEAFLAL

SEQ ID NO: 136446 - protein, 9 aa, Homo Sapiens
TSPEIVTAL

SEQ ID NO: 136447 - protein, 9 aa, Homo Sapiens
TSPENNASL

SEQ ID NO: 136448 - protein, 9 aa, Homo Sapiens
TSPQFQQAL

SEQ ID NO: 136449 - protein, 9 aa, Homo Sapiens
TSPVINTSL

SEQ ID NO: 136450 - protein, 9 aa, Homo Sapiens
TSPVINVPL

SEQ ID NO: 136451 - protein, 9 aa, Homo Sapiens
TSPVPGRTL

SEQ ID NO: 136452 - protein, 9 aa, Homo Sapiens
TSPVTARTL

SEQ ID NO: 136453 - protein, 9 aa, Homo Sapiens
TTPIQTAAL

SEQ ID NO: 136454 - protein, 9 aa, Homo Sapiens
TVMDKTRAL

SEQ ID NO: 136455 - protein, 9 aa, Homo Sapiens
TVPASFSSL

SEQ ID NO: 136456 - protein, 9 aa, Homo Sapiens
TVPATEQEL

SEQ ID NO: 136457 - protein, 9 aa, Homo Sapiens
TVPFTVESL

SEQ ID NO: 136458 - protein, 9 aa, Homo Sapiens
TVPKDLRHL

SEQ ID NO: 136459 - protein, 9 aa, Homo Sapiens
TVPLPASQL

SEQ ID NO: 136460 - protein, 9 aa, Homo Sapiens
TVYLRDIAL

SEQ ID NO: 136461 - protein, 9 aa, Homo Sapiens
TVYVSMIAL

SEQ ID NO: 136462 - protein, 9 aa, Homo Sapiens
TWDERFSAL

SEQ ID NO: 136463 - protein, 9 aa, Homo Sapiens
VANVSLLAL

SEQ ID NO: 136464 - protein, 9 aa, Homo Sapiens
VAPAAASSL

SEQ ID NO: 136465 - protein, 9 aa, Homo Sapiens
VAPAGPASL

SEQ ID NO: 136466 - protein, 9 aa, Homo Sapiens
VAPASVITI

SEQ ID NO: 136467 - protein, 9 aa, Homo Sapiens
VAPAYGVYL

SEQ ID NO: 136468 - protein, 9 aa, Homo Sapiens
VAPEEHPVL

SEQ ID NO: 136469 - protein, 9 aa, Homo Sapiens
VAPESFEYI

SEQ ID NO: 136470 - protein, 9 aa, Homo Sapiens
VAPFFKSYI

SEQ ID NO: 136471 - protein, 9 aa, Homo Sapiens
VAPGKRPAL

SEQ ID NO: 136472 - protein, 9 aa, Homo Sapiens
VAPGLVLGL

SEQ ID NO: 136473 - protein, 9 aa, Homo Sapiens
VAPGPVIGL

SEQ ID NO: 136474 - protein, 9 aa, Homo Sapiens
VAPGSVQCL

SEQ ID NO: 136475 - protein, 9 aa, Homo Sapiens
VAPGTGIDL

SEQ ID NO: 136476 - protein, 9 aa, Homo Sapiens
VAPKQLHSL

SEQ ID NO: 136477 - protein, 9 aa, Homo Sapiens
VAPLATVNI

SEQ ID NO: 136478 - protein, 9 aa, Homo Sapiens
VAPPGCSHL

SEQ ID NO: 136479 - protein, 9 aa, Homo Sapiens
VAPPGNISL

SEQ ID NO: 136480 - protein, 9 aa, Homo Sapiens
VAPPKAHEV

SEQ ID NO: 136481 - protein, 9 aa, Homo Sapiens
VAPPPPTHL

SEQ ID NO: 136482 - protein, 9 aa, Homo Sapiens
VAPPVSGDL

SEQ ID NO: 136483 - protein, 9 aa, Homo Sapiens
VAPRNSAEL

SEQ ID NO: 136484 - protein, 9 aa, Homo Sapiens
VAPSFGTLL

SEQ ID NO: 136485 - protein, 9 aa, Homo Sapiens
VAPSRAIYF

SEQ ID NO: 136486 - protein, 9 aa, Homo Sapiens
VAPSRIRTL

SEQ ID NO: 136487 - protein, 9 aa, Homo Sapiens
VAPTAGHSV

SEQ ID NO: 136488 - protein, 9 aa, Homo Sapiens
VAPTSGPAL

SEQ ID NO: 136489 - protein, 9 aa, Homo Sapiens
VAPTSTVAV

SEQ ID NO: 136490 - protein, 9 aa, Homo Sapiens
VAPVAPVAV

SEQ ID NO: 136491 - protein, 9 aa, Homo Sapiens
VAPVAQVAL

SEQ ID NO: 136492 - protein, 9 aa, Homo Sapiens
VAPVPCTTL

SEQ ID NO: 136493 - protein, 9 aa, Homo Sapiens
VAPVSAVHA

SEQ ID NO: 136494 - protein, 9 aa, Homo Sapiens
VAPVTGNDV

SEQ ID NO: 136495 - protein, 9 aa, Homo Sapiens
VAPWNSLSL

SEQ ID NO: 136496 - protein, 9 aa, Homo Sapiens
VAYVSSVAL

SEQ ID NO: 136497 - protein, 9 aa, Homo Sapiens
VFAEKITSL

SEQ ID NO: 136498 - protein, 9 aa, Homo Sapiens
VFCPVKEAL

SEQ ID NO: 136499 - protein, 9 aa, Homo Sapiens
VFIDGPLAL

SEQ ID NO: 136500 - protein, 9 aa, Homo Sapiens
VFIDKQTNL

SEQ ID NO: 136501 - protein, 9 aa, Homo Sapiens
VFLPRVTEL

SEQ ID NO: 136502 - protein, 9 aa, Homo Sapiens
VFQERINCL

SEQ ID NO: 136503 - protein, 9 aa, Homo Sapiens
VGPGFDAAL

SEQ ID NO: 136504 - protein, 9 aa, Homo Sapiens
VGPGPALML

SEQ ID NO: 136505 - protein, 9 aa, Homo Sapiens
VGPGPTAAA

SEQ ID NO: 136506 - protein, 9 aa, Homo Sapiens
VGPGPYRAT

SEQ ID NO: 136507 - protein, 9 aa, Homo Sapiens
VGPPAGSPF

SEQ ID NO: 136508 - protein, 9 aa, Homo Sapiens
VGPPPATSI

SEQ ID NO: 136509 - protein, 9 aa, Homo Sapiens
VGPSSDKAL

SEQ ID NO: 136510 - protein, 9 aa, Homo Sapiens
VGPVGNSDL

SEQ ID NO: 136511 - protein, 9 aa, Homo Sapiens
VIAPNPAQL

SEQ ID NO: 136512 - protein, 9 aa, Homo Sapiens
VIFATVREL

SEQ ID NO: 136513 - protein, 9 aa, Homo Sapiens
VIHATVTSV

SEQ ID NO: 136514 - protein, 9 aa, Homo Sapiens
VIIEKTYSL

SEQ ID NO: 136515 - protein, 9 aa, Homo Sapiens
VIKEQNREL

SEQ ID NO: 136516 - protein, 9 aa, Homo Sapiens
VINEMVREL

SEQ ID NO: 136517 - protein, 9 aa, Homo Sapiens
VINGHTLCL

SEQ ID NO: 136518 - protein, 9 aa, Homo Sapiens
VIPDEAKAL

SEQ ID NO: 136519 - protein, 9 aa, Homo Sapiens
VIPDTIKEV

SEQ ID NO: 136520 - protein, 9 aa, Homo Sapiens
VIPELAQEL

SEQ ID NO: 136521 - protein, 9 aa, Homo Sapiens
VIPHIHKSL

SEQ ID NO: 136522 - protein, 9 aa, Homo Sapiens
VIPIIGKCL

SEQ ID NO: 136523 - protein, 9 aa, Homo Sapiens
VIPKDYKTM

SEQ ID NO: 136524 - protein, 9 aa, Homo Sapiens
VIPQYHSSV

SEQ ID NO: 136525 - protein, 9 aa, Homo Sapiens
VIPRITIEM

SEQ ID NO: 136526 - protein, 9 aa, Homo Sapiens
VIPSTPLAI

SEQ ID NO: 136527 - protein, 9 aa, Homo Sapiens
VIPTNVPEL

SEQ ID NO: 136528 - protein, 9 aa, Homo Sapiens
VIPYANHEL

SEQ ID NO: 136529 - protein, 9 aa, Homo Sapiens
VIQDFINAL

SEQ ID NO: 136530 - protein, 9 aa, Homo Sapiens
VISGGASDL

SEQ ID NO: 136531 - protein, 9 aa, Homo Sapiens
VLGSGFGEL

SEQ ID NO: 136532 - protein, 9 aa, Homo Sapiens
VLLPAASEL

SEQ ID NO: 136533 - protein, 9 aa, Homo Sapiens
VLPAFTSNL

SEQ ID NO: 136534 - protein, 9 aa, Homo Sapiens
VLPEVESSL

SEQ ID NO: 136535 - protein, 9 aa, Homo Sapiens
VLPNIQAVL

SEQ ID NO: 136536 - protein, 9 aa, Homo Sapiens
VLPNTALHL

SEQ ID NO: 136537 - protein, 9 aa, Homo Sapiens
VLPQRIREL

SEQ ID NO: 136538 - protein, 9 aa, Homo Sapiens
VLPSYEEAL

SEQ ID NO: 136539 - protein, 9 aa, Homo Sapiens
VLPVYMNCL

SEQ ID NO: 136540 - protein, 9 aa, Homo Sapiens
VMPGHSESL

SEQ ID NO: 136541 - protein, 9 aa, Homo Sapiens
VMPSRLKAL

SEQ ID NO: 136542 - protein, 9 aa, Homo Sapiens
VMPYIKTSL

SEQ ID NO: 136543 - protein, 9 aa, Homo Sapiens
VSCQKQPAL

SEQ ID NO: 136544 - protein, 9 aa, Homo Sapiens
VSPATSQSI

SEQ ID NO: 136545 - protein, 9 aa, Homo Sapiens
VSPDAKTSL

SEQ ID NO: 136546 - protein, 9 aa, Homo Sapiens
VSPFAFEAM

SEQ ID NO: 136547 - protein, 9 aa, Homo Sapiens
VSPGPLHCL

SEQ ID NO: 136548 - protein, 9 aa, Homo Sapiens
VSPGPRPVL

SEQ ID NO: 136549 - protein, 9 aa, Homo Sapiens
VSPGQASPL

SEQ ID NO: 136550 - protein, 9 aa, Homo Sapiens
VSPLATSAL

SEQ ID NO: 136551 - protein, 9 aa, Homo Sapiens
VSPLNVTSV

SEQ ID NO: 136552 - protein, 9 aa, Homo Sapiens
VSPNRLVAM

SEQ ID NO: 136553 - protein, 9 aa, Homo Sapiens
VSPPIRPSL

SEQ ID NO: 136554 - protein, 9 aa, Homo Sapiens
VSPPPGAVL

SEQ ID NO: 136555 - protein, 9 aa, Homo Sapiens
VSPQSRASL

SEQ ID NO: 136556 - protein, 9 aa, Homo Sapiens
VSPRQTLEL

SEQ ID NO: 136557 - protein, 9 aa, Homo Sapiens
VSPSFSAEL

SEQ ID NO: 136558 - protein, 9 aa, Homo Sapiens
VSPTKKVAV

SEQ ID NO: 136559 - protein, 9 aa, Homo Sapiens
VSPTVNQRL

SEQ ID NO: 136560 - protein, 9 aa, Homo Sapiens
VSPYSGAVF

SEQ ID NO: 136561 - protein, 9 aa, Homo Sapiens
VSQEVTRSL

SEQ ID NO: 136562 - protein, 9 aa, Homo Sapiens
VTAVSGKAL

SEQ ID NO: 136563 - protein, 9 aa, Homo Sapiens
VTPGSKAAL

SEQ ID NO: 136564 - protein, 9 aa, Homo Sapiens
VTPNCRVAL

SEQ ID NO: 136565 - protein, 9 aa, Homo Sapiens
VTPNTGMSL

SEQ ID NO: 136566 - protein, 9 aa, Homo Sapiens
VTPQAGTAL

SEQ ID NO: 136567 - protein, 9 aa, Homo Sapiens
VTPSAMAEL

SEQ ID NO: 136568 - protein, 9 aa, Homo Sapiens
VTPSKYSSL

SEQ ID NO: 136569 - protein, 9 aa, Homo Sapiens
VTPVTGASL

SEQ ID NO: 136570 - protein, 9 aa, Homo Sapiens
VVIGNIGAL

SEQ ID NO: 136571 - protein, 9 aa, Homo Sapiens
VVKPPGSSL

SEQ ID NO: 136572 - protein, 9 aa, Homo Sapiens
VVNGRVLEL

SEQ ID NO: 136573 - protein, 9 aa, Homo Sapiens
VVPARSEAL

SEQ ID NO: 136574 - protein, 9 aa, Homo Sapiens
VVPDSAHKL

SEQ ID NO: 136575 - protein, 9 aa, Homo Sapiens
VVPSCVASL

SEQ ID NO: 136576 - protein, 9 aa, Homo Sapiens
VVQDVASAL

SEQ ID NO: 136577 - protein, 9 aa, Homo Sapiens
VVQGDPREL

SEQ ID NO: 136578 - protein, 9 aa, Homo Sapiens
YAPARLAAA

SEQ ID NO: 136579 - protein, 9 aa, Homo Sapiens
YAPHYDSTF

SEQ ID NO: 136580 - protein, 9 aa, Homo Sapiens
YAPINANAI

SEQ ID NO: 136581 - protein, 9 aa, Homo Sapiens
YAPMGMHPM

SEQ ID NO: 136582 - protein, 9 aa, Homo Sapiens
YAPPPFLHI

SEQ ID NO: 136583 - protein, 9 aa, Homo Sapiens
YAPQGWIAF

SEQ ID NO: 136584 - protein, 9 aa, Homo Sapiens
YAPVHADDL

SEQ ID NO: 136585 - protein, 9 aa, Homo Sapiens
YAPYPSPVL

SEQ ID NO: 136586 - protein, 9 aa, Homo Sapiens
YFEGGVSSV

SEQ ID NO: 136587 - protein, 9 aa, Homo Sapiens
YIPEAILNL

SEQ ID NO: 136588 - protein, 9 aa, Homo Sapiens
YIPGKNRDL

SEQ ID NO: 136589 - protein, 9 aa, Homo Sapiens
YIPHGYMEL

SEQ ID NO: 136590 - protein, 9 aa, Homo Sapiens
YLGNFRSAL

SEQ ID NO: 136591 - protein, 9 aa, Homo Sapiens
YLNVQVKEL

SEQ ID NO: 136592 - protein, 9 aa, Homo Sapiens
YLPAGQSVL

SEQ ID NO: 136593 - protein, 9 aa, Homo Sapiens
YLPDAVKGL

SEQ ID NO: 136594 - protein, 9 aa, Homo Sapiens
YLPPGFLSA

SEQ ID NO: 136595 - protein, 9 aa, Homo Sapiens
YLPPGVIAL

SEQ ID NO: 136596 - protein, 9 aa, Homo Sapiens
YLPSAILQL

SEQ ID NO: 136597 - protein, 9 aa, Homo Sapiens
YLPSFFTKL

SEQ ID NO: 136598 - protein, 9 aa, Homo Sapiens
YLPVGSHNL

SEQ ID NO: 136599 - protein, 9 aa, Homo Sapiens
YMGIRDTEL

SEQ ID NO: 136600 - protein, 9 aa, Homo Sapiens
YMIAHITGL

SEQ ID NO: 136601 - protein, 9 aa, Homo Sapiens
YMPMNANDL

SEQ ID NO: 136602 - protein, 9 aa, Homo Sapiens
YMPPPYASL

SEQ ID NO: 136603 - protein, 9 aa, Homo Sapiens
YMSPHPSPL

SEQ ID NO: 136604 - protein, 9 aa, Homo Sapiens
YSPAGNLEL

SEQ ID NO: 136605 - protein, 9 aa, Homo Sapiens
YSPEACRSM

SEQ ID NO: 136606 - protein, 9 aa, Homo Sapiens
YSPERQRSL

SEQ ID NO: 136607 - protein, 9 aa, Homo Sapiens
YSPFGDSPL

SEQ ID NO: 136608 - protein, 9 aa, Homo Sapiens
YSPGMTMSV

SEQ ID NO: 136609 - protein, 9 aa, Homo Sapiens
YSPIRLLEV

SEQ ID NO: 136610 - protein, 9 aa, Homo Sapiens
YSPQRERPL

SEQ ID NO: 136611 - protein, 9 aa, Homo Sapiens
YSPVSRIGL

SEQ ID NO: 136612 - protein, 9 aa, Homo Sapiens
YTAFSERPL

SEQ ID NO: 136613 - protein, 9 aa, Homo Sapiens
YTPEERRAL

SEQ ID NO: 136614 - protein, 9 aa, Homo Sapiens
YTPYGWLQL

SEQ ID NO: 136615 - protein, 9 aa, Homo Sapiens
YVPFAERSL

SEQ ID NO: 136616 - protein, 9 aa, Homo Sapiens
YVPNAGRGL

SEQ ID NO: 136617 - protein, 9 aa, Homo Sapiens
YVPTSYVEV

SEQ ID NO: 136618 - protein, 10 aa, Homo Sapiens
AAAAAATPGL

SEQ ID NO: 136619 - protein, 10 aa, Homo Sapiens
AAPAAAGAAL

SEQ ID NO: 136620 - protein, 10 aa, Homo Sapiens
AAPGPGRKEL

SEQ ID NO: 136621 - protein, 10 aa, Homo Sapiens
AAPGSARRPL

SEQ ID NO: 136622 - protein, 10 aa, Homo Sapiens
AAPYGGPIAL

SEQ ID NO: 136623 - protein, 10 aa, Homo Sapiens
AGHDNRVSCL

SEQ ID NO: 136624 - protein, 10 aa, Homo Sapiens
AGPDSAGIAL

SEQ ID NO: 136625 - protein, 10 aa, Homo Sapiens
AIHLIDPNTL

SEQ ID NO: 136626 - protein, 10 aa, Homo Sapiens
ALAEIAKAEL

SEQ ID NO: 136627 - protein, 10 aa, Homo Sapiens
ALDASQHSSL

SEQ ID NO: 136628 - protein, 10 aa, Homo Sapiens
ALHATSQQPL

SEQ ID NO: 136629 - protein, 10 aa, Homo Sapiens
ALHERELDSL

SEQ ID NO: 136630 - protein, 10 aa, Homo Sapiens
ALHLQPLRSA

SEQ ID NO: 136631 - protein, 10 aa, Homo Sapiens
ALHNCPAISL

SEQ ID NO: 136632 - protein, 10 aa, Homo Sapiens
ALHQHTISTL

SEQ ID NO: 136633 - protein, 10 aa, Homo Sapiens
ALHQKQLLTL

SEQ ID NO: 136634 - protein, 10 aa, Homo Sapiens
ALNPAALTAL

SEQ ID NO: 136635 - protein, 10 aa, Homo Sapiens
ALNTSKYLEL

SEQ ID NO: 136636 - protein, 10 aa, Homo Sapiens
ALPAAPASSL

SEQ ID NO: 136637 - protein, 10 aa, Homo Sapiens
ALPDIKVLTL

SEQ ID NO: 136638 - protein, 10 aa, Homo Sapiens
ALPEDDFLSL

SEQ ID NO: 136639 - protein, 10 aa, Homo Sapiens
ALPPGSYASL

SEQ ID NO: 136640 - protein, 10 aa, Homo Sapiens
ALPSGQLTSL

SEQ ID NO: 136641 - protein, 10 aa, Homo Sapiens
ALPSSSYTDL

SEQ ID NO: 136642 - protein, 10 aa, Homo Sapiens
ALSQSNPSAL

SEQ ID NO: 136643 - protein, 10 aa, Homo Sapiens
ALYDICFRTL

SEQ ID NO: 136644 - protein, 10 aa, Homo Sapiens
ASPAGEWRAL

SEQ ID NO: 136645 - protein, 10 aa, Homo Sapiens
ASPAKGEPSL

SEQ ID NO: 136646 - protein, 10 aa, Homo Sapiens
ASPASLARTL

SEQ ID NO: 136647 - protein, 10 aa, Homo Sapiens
ATPAGDIMEL

SEQ ID NO: 136648 - protein, 10 aa, Homo Sapiens
CGPSGLVREL

SEQ ID NO: 136649 - protein, 10 aa, Homo Sapiens
CITPTGTHPL

SEQ ID NO: 136650 - protein, 10 aa, Homo Sapiens
CSPASRSISL

SEQ ID NO: 136651 - protein, 10 aa, Homo Sapiens
CVPETKGRSL

SEQ ID NO: 136652 - protein, 10 aa, Homo Sapiens
ELHDHGVSSL

SEQ ID NO: 136653 - protein, 10 aa, Homo Sapiens
FGPDSKSSAL

SEQ ID NO: 136654 - protein, 10 aa, Homo Sapiens
FICDYELHEL

SEQ ID NO: 136655 - protein, 10 aa, Homo Sapiens
FIPDVKGAVL

SEQ ID NO: 136656 - protein, 10 aa, Homo Sapiens
FIPEHTNLSL

SEQ ID NO: 136657 - protein, 10 aa, Homo Sapiens
FIPESWLNSL

SEQ ID NO: 136658 - protein, 10 aa, Homo Sapiens
FITEEDYQAL

SEQ ID NO: 136659 - protein, 10 aa, Homo Sapiens
FLPAGIVAVL

SEQ ID NO: 136660 - protein, 10 aa, Homo Sapiens
FLPARFYQAL

SEQ ID NO: 136661 - protein, 10 aa, Homo Sapiens
FLPEEAWCDL

SEQ ID NO: 136662 - protein, 10 aa, Homo Sapiens
FLPEGGCYEL

SEQ ID NO: 136663 - protein, 10 aa, Homo Sapiens
FLPRQPPMSL

SEQ ID NO: 136664 - protein, 10 aa, Homo Sapiens
FLRQVGVTEM

SEQ ID NO: 136665 - protein, 10 aa, Homo Sapiens
FLSEHPNVTL

SEQ ID NO: 136666 - protein, 10 aa, Homo Sapiens
FVDPNGKISL

SEQ ID NO: 136667 - protein, 10 aa, Homo Sapiens
GLPSQKTASL

SEQ ID NO: 136668 - protein, 10 aa, Homo Sapiens
GLSENPFASL

SEQ ID NO: 136669 - protein, 10 aa, Homo Sapiens
GNCPERIITL

SEQ ID NO: 136670 - protein, 10 aa, Homo Sapiens
GPGPGPTTPL

SEQ ID NO: 136671 - protein, 10 aa, Homo Sapiens
GSVPEAQSAL

SEQ ID NO: 136672 - protein, 10 aa, Homo Sapiens
HIPDQETTSL

SEQ ID NO: 136673 - protein, 10 aa, Homo Sapiens
HISNSHPLSL

SEQ ID NO: 136674 - protein, 10 aa, Homo Sapiens
HLGSKGTSSL

SEQ ID NO: 136675 - protein, 10 aa, Homo Sapiens
HLHESCVLSL

SEQ ID NO: 136676 - protein, 10 aa, Homo Sapiens
HLHNMPPSAL

SEQ ID NO: 136677 - protein, 10 aa, Homo Sapiens
HLHTQALTAL

SEQ ID NO: 136678 - protein, 10 aa, Homo Sapiens
HLIDLPTCEL

SEQ ID NO: 136679 - protein, 10 aa, Homo Sapiens
HLPESQSSSV

SEQ ID NO: 136680 - protein, 10 aa, Homo Sapiens
HLPNDFPTCL

SEQ ID NO: 136681 - protein, 10 aa, Homo Sapiens
HLPTKEASSL

SEQ ID NO: 136682 - protein, 10 aa, Homo Sapiens
HLSDTGISAL

SEQ ID NO: 136683 - protein, 10 aa, Homo Sapiens
HLSSSQLQSL

SEQ ID NO: 136684 - protein, 10 aa, Homo Sapiens
IAPDFPAQVL

SEQ ID NO: 136685 - protein, 10 aa, Homo Sapiens
IINDPRYSAL

SEQ ID NO: 136686 - protein, 10 aa, Homo Sapiens
ILAEFKVRAL

SEQ ID NO: 136687 - protein, 10 aa, Homo Sapiens
ILARDGPNAL

SEQ ID NO: 136688 - protein, 10 aa, Homo Sapiens
ILPEQGVSAL

SEQ ID NO: 136689 - protein, 10 aa, Homo Sapiens
ILPKKPCKNL

SEQ ID NO: 136690 - protein, 10 aa, Homo Sapiens
ILSDRPCLEL

SEQ ID NO: 136691 - protein, 10 aa, Homo Sapiens
ILTDESLSSL

SEQ ID NO: 136692 - protein, 10 aa, Homo Sapiens
ISPASTPSCL

SEQ ID NO: 136693 - protein, 10 aa, Homo Sapiens
KFHTEALTAL

SEQ ID NO: 136694 - protein, 10 aa, Homo Sapiens
KIIDRAITSL

SEQ ID NO: 136695 - protein, 10 aa, Homo Sapiens
KISERTPSAL

SEQ ID NO: 136696 - protein, 10 aa, Homo Sapiens
KLFEHYYQEL

SEQ ID NO: 136697 - protein, 10 aa, Homo Sapiens
KLFSEKRVEL

SEQ ID NO: 136698 - protein, 10 aa, Homo Sapiens
KLGEKERSEL

SEQ ID NO: 136699 - protein, 10 aa, Homo Sapiens
KLHEEEIQEL

SEQ ID NO: 136700 - protein, 10 aa, Homo Sapiens
KLHGVKLEAL

SEQ ID NO: 136701 - protein, 10 aa, Homo Sapiens
KLPALPTQAL

SEQ ID NO: 136702 - protein, 10 aa, Homo Sapiens
KLPDYSSIEI

SEQ ID NO: 136703 - protein, 10 aa, Homo Sapiens
KLPEYNPRTL

SEQ ID NO: 136704 - protein, 10 aa, Homo Sapiens
KLPNYDAREI

SEQ ID NO: 136705 - protein, 10 aa, Homo Sapiens
KLPSHATHSL

SEQ ID NO: 136706 - protein, 10 aa, Homo Sapiens
KLSCQPMLSL

SEQ ID NO: 136707 - protein, 10 aa, Homo Sapiens
KLSDSVFRCL

SEQ ID NO: 136708 - protein, 10 aa, Homo Sapiens
KLSNHVFNAL

SEQ ID NO: 136709 - protein, 10 aa, Homo Sapiens
KTPEEAYRAL

SEQ ID NO: 136710 - protein, 10 aa, Homo Sapiens
KWDSHFRESV

SEQ ID NO: 136711 - protein, 10 aa, Homo Sapiens
LAPDYDALDV

SEQ ID NO: 136712 - protein, 10 aa, Homo Sapiens
LLHMESPTCL

SEQ ID NO: 136713 - protein, 10 aa, Homo Sapiens
LLPDQPPYHL

SEQ ID NO: 136714 - protein, 10 aa, Homo Sapiens
LLPEEPVSQL

SEQ ID NO: 136715 - protein, 10 aa, Homo Sapiens
LLPSSGFMEL

SEQ ID NO: 136716 - protein, 10 aa, Homo Sapiens
LLPTHAFSTL

SEQ ID NO: 136717 - protein, 10 aa, Homo Sapiens
LLSPTPATAL

SEQ ID NO: 136718 - protein, 10 aa, Homo Sapiens
LSGPQRSALL

SEQ ID NO: 136719 - protein, 10 aa, Homo Sapiens
LSPDSRASSL

SEQ ID NO: 136720 - protein, 10 aa, Homo Sapiens
LSPSSLFSAL

SEQ ID NO: 136721 - protein, 10 aa, Homo Sapiens
MAPAYLPRSL

SEQ ID NO: 136722 - protein, 10 aa, Homo Sapiens
MLPAEGVKEL

SEQ ID NO: 136723 - protein, 10 aa, Homo Sapiens
MMPPMGGPPM

SEQ ID NO: 136724 - protein, 10 aa, Homo Sapiens
MVPPVQVSPL

SEQ ID NO: 136725 - protein, 10 aa, Homo Sapiens
NFPEHIFPAL

SEQ ID NO: 136726 - protein, 10 aa, Homo Sapiens
NLPKQPPLAL

SEQ ID NO: 136727 - protein, 10 aa, Homo Sapiens
NLPQYVSNEL

SEQ ID NO: 136728 - protein, 10 aa, Homo Sapiens
PLPDRSLPAL

SEQ ID NO: 136729 - protein, 10 aa, Homo Sapiens
PSSLPVGPVL

SEQ ID NO: 136730 - protein, 10 aa, Homo Sapiens
QLHRQGLLSL

SEQ ID NO: 136731 - protein, 10 aa, Homo Sapiens
QLPAPKWTEL

SEQ ID NO: 136732 - protein, 10 aa, Homo Sapiens
QLPDYYDTPL

SEQ ID NO: 136733 - protein, 10 aa, Homo Sapiens
QLPQLPLAAL

SEQ ID NO: 136734 - protein, 10 aa, Homo Sapiens
QSPAPTHNSL

SEQ ID NO: 136735 - protein, 10 aa, Homo Sapiens
QSPEGRYSAL

SEQ ID NO: 136736 - protein, 10 aa, Homo Sapiens
RGPSFKASSL

SEQ ID NO: 136737 - protein, 10 aa, Homo Sapiens
RIHESSPLDL

SEQ ID NO: 136738 - protein, 10 aa, Homo Sapiens
RINEILSNAL

SEQ ID NO: 136739 - protein, 10 aa, Homo Sapiens
RIPNFKGSYL

SEQ ID NO: 136740 - protein, 10 aa, Homo Sapiens
RLANKDRPAL

SEQ ID NO: 136741 - protein, 10 aa, Homo Sapiens
RLNDAALRAL

SEQ ID NO: 136742 - protein, 10 aa, Homo Sapiens
RLPARGFREV

SEQ ID NO: 136743 - protein, 10 aa, Homo Sapiens
RLPDTALPTL

SEQ ID NO: 136744 - protein, 10 aa, Homo Sapiens
RLPGAAARCL

SEQ ID NO: 136745 - protein, 10 aa, Homo Sapiens
RLPLRYPRAL

SEQ ID NO: 136746 - protein, 10 aa, Homo Sapiens
RLPQGIVREL

SEQ ID NO: 136747 - protein, 10 aa, Homo Sapiens
RLPSDPFTHL

SEQ ID NO: 136748 - protein, 10 aa, Homo Sapiens
RLPSKPYSTL

SEQ ID NO: 136749 - protein, 10 aa, Homo Sapiens
RLPVGGFRSL

SEQ ID NO: 136750 - protein, 10 aa, Homo Sapiens
RLSERQARAL

SEQ ID NO: 136751 - protein, 10 aa, Homo Sapiens
RLSQVPMSAL

SEQ ID NO: 136752 - protein, 10 aa, Homo Sapiens
RTPAGNFVTL

SEQ ID NO: 136753 - protein, 10 aa, Homo Sapiens
RVAEHHVATL

SEQ ID NO: 136754 - protein, 10 aa, Homo Sapiens
SAPGGGPGTL

SEQ ID NO: 136755 - protein, 10 aa, Homo Sapiens
SAPGPGYAPL

SEQ ID NO: 136756 - protein, 10 aa, Homo Sapiens
SAPGPSGQSV

SEQ ID NO: 136757 - protein, 10 aa, Homo Sapiens
SAPGYLPTSL

SEQ ID NO: 136758 - protein, 10 aa, Homo Sapiens
SAPSYLARSL

SEQ ID NO: 136759 - protein, 10 aa, Homo Sapiens
SAPSYPMASL

SEQ ID NO: 136760 - protein, 10 aa, Homo Sapiens
SFHTTPNTSL

SEQ ID NO: 136761 - protein, 10 aa, Homo Sapiens
SGPAGPILSL

SEQ ID NO: 136762 - protein, 10 aa, Homo Sapiens
SGPGGVVACL

SEQ ID NO: 136763 - protein, 10 aa, Homo Sapiens
SLAPTDVKEL

SEQ ID NO: 136764 - protein, 10 aa, Homo Sapiens
SLDDRVLSSL

SEQ ID NO: 136765 - protein, 10 aa, Homo Sapiens
SLDPSNRKPL

SEQ ID NO: 136766 - protein, 10 aa, Homo Sapiens
SLHSQPPQHL

SEQ ID NO: 136767 - protein, 10 aa, Homo Sapiens
SLNEKKLLEL

SEQ ID NO: 136768 - protein, 10 aa, Homo Sapiens
SLPALPLAEL

SEQ ID NO: 136769 - protein, 10 aa, Homo Sapiens
SLPATATMSL

SEQ ID NO: 136770 - protein, 10 aa, Homo Sapiens
SLPEDHFSEL

SEQ ID NO: 136771 - protein, 10 aa, Homo Sapiens
SLPEKKGNTL

SEQ ID NO: 136772 - protein, 10 aa, Homo Sapiens
SLPGSPTHSL

SEQ ID NO: 136773 - protein, 10 aa, Homo Sapiens
SLPKEAFLVL

SEQ ID NO: 136774 - protein, 10 aa, Homo Sapiens
SLPNDVISSL

SEQ ID NO: 136775 - protein, 10 aa, Homo Sapiens
SLPSRKLVAL

SEQ ID NO: 136776 - protein, 10 aa, Homo Sapiens
SLPSSGRSSL

SEQ ID NO: 136777 - protein, 10 aa, Homo Sapiens
SLPTVGPSGL

SEQ ID NO: 136778 - protein, 10 aa, Homo Sapiens
SLPVHVFEAL

SEQ ID NO: 136779 - protein, 10 aa, Homo Sapiens
SLPYEPYKAL

SEQ ID NO: 136780 - protein, 10 aa, Homo Sapiens
SLSSADLSSL

SEQ ID NO: 136781 - protein, 10 aa, Homo Sapiens
SLTEADFREL

SEQ ID NO: 136782 - protein, 10 aa, Homo Sapiens
SPLPIVRSNL

SEQ ID NO: 136783 - protein, 10 aa, Homo Sapiens
SSPKLPVSSL

SEQ ID NO: 136784 - protein, 10 aa, Homo Sapiens
SSPLGSGEGL

SEQ ID NO: 136785 - protein, 10 aa, Homo Sapiens
STPEEKLAAL

SEQ ID NO: 136786 - protein, 10 aa, Homo Sapiens
STPGGSHPAL

SEQ ID NO: 136787 - protein, 10 aa, Homo Sapiens
SVPDGFLSEL

SEQ ID NO: 136788 - protein, 10 aa, Homo Sapiens
SVPENKGISL

SEQ ID NO: 136789 - protein, 10 aa, Homo Sapiens
TGHTGDVMSL

SEQ ID NO: 136790 - protein, 10 aa, Homo Sapiens
TIASQRLTPL

SEQ ID NO: 136791 - protein, 10 aa, Homo Sapiens
TIPEIATSEL

SEQ ID NO: 136792 - protein, 10 aa, Homo Sapiens
TIPKSKFLAL

SEQ ID NO: 136793 - protein, 10 aa, Homo Sapiens
TISDRYYTAL

SEQ ID NO: 136794 - protein, 10 aa, Homo Sapiens
TLNASILNSL

SEQ ID NO: 136795 - protein, 10 aa, Homo Sapiens
TLNKNNLTEL

SEQ ID NO: 136796 - protein, 10 aa, Homo Sapiens
TLPEENYQVL

SEQ ID NO: 136797 - protein, 10 aa, Homo Sapiens
TLPEQHLQEL

SEQ ID NO: 136798 - protein, 10 aa, Homo Sapiens
TLPERPLTEV

SEQ ID NO: 136799 - protein, 10 aa, Homo Sapiens
TLPIAASSSL

SEQ ID NO: 136800 - protein, 10 aa, Homo Sapiens
TLPWGTLSSL

SEQ ID NO: 136801 - protein, 10 aa, Homo Sapiens
TLSDRQPAEL

SEQ ID NO: 136802 - protein, 10 aa, Homo Sapiens
TLSSTKNRAL

SEQ ID NO: 136803 - protein, 10 aa, Homo Sapiens
TSGPASSPVA

SEQ ID NO: 136804 - protein, 10 aa, Homo Sapiens
TSPAGLKAVL

SEQ ID NO: 136805 - protein, 10 aa, Homo Sapiens
TSPAGSSPAV

SEQ ID NO: 136806 - protein, 10 aa, Homo Sapiens
TSPGGSYGHL

SEQ ID NO: 136807 - protein, 10 aa, Homo Sapiens
VAPEKQATEL

SEQ ID NO: 136808 - protein, 10 aa, Homo Sapiens
VAPVGSGSAL

SEQ ID NO: 136809 - protein, 10 aa, Homo Sapiens
VGPGGEITEL

SEQ ID NO: 136810 - protein, 10 aa, Homo Sapiens
VGPPGTGKTL

SEQ ID NO: 136811 - protein, 10 aa, Homo Sapiens
VHPGGDTVAI

SEQ ID NO: 136812 - protein, 10 aa, Homo Sapiens
VIAEHANDSL

SEQ ID NO: 136813 - protein, 10 aa, Homo Sapiens
VIDEIGKMEL

SEQ ID NO: 136814 - protein, 10 aa, Homo Sapiens
VIPDGPTRAL

SEQ ID NO: 136815 - protein, 10 aa, Homo Sapiens
VIPDIPDHFL

SEQ ID NO: 136816 - protein, 10 aa, Homo Sapiens
VIQEHQPSVL

SEQ ID NO: 136817 - protein, 10 aa, Homo Sapiens
VIYDSNGVVL

SEQ ID NO: 136818 - protein, 10 aa, Homo Sapiens
VLPQTRYVEL

SEQ ID NO: 136819 - protein, 10 aa, Homo Sapiens
VLPSERYKEL

SEQ ID NO: 136820 - protein, 10 aa, Homo Sapiens
VLPTLPFHVL

SEQ ID NO: 136821 - protein, 10 aa, Homo Sapiens
VLSAADKGNV

SEQ ID NO: 136822 - protein, 10 aa, Homo Sapiens
VLSERDYESL

SEQ ID NO: 136823 - protein, 10 aa, Homo Sapiens
VLSSLPLNSL

SEQ ID NO: 136824 - protein, 10 aa, Homo Sapiens
VSAAGLVQGL

SEQ ID NO: 136825 - protein, 10 aa, Homo Sapiens
VSPAKNPSSL

SEQ ID NO: 136826 - protein, 10 aa, Homo Sapiens
VSPCGKFLAA

SEQ ID NO: 136827 - protein, 10 aa, Homo Sapiens
VVPNKGYSSL

SEQ ID NO: 136828 - protein, 10 aa, Homo Sapiens
YAPSGNYVAC

SEQ ID NO: 136829 - protein, 10 aa, Homo Sapiens
YGPPGTGKTL

SEQ ID NO: 136830 - protein, 10 aa, Homo Sapiens
YIIKQDINSL

SEQ ID NO: 136831 - protein, 10 aa, Homo Sapiens
YIPDGHTKEM

SEQ ID NO: 136832 - protein, 10 aa, Homo Sapiens
YIPDYSVRAL

SEQ ID NO: 136833 - protein, 10 aa, Homo Sapiens
YIPQRPYMSL

SEQ ID NO: 136834 - protein, 10 aa, Homo Sapiens
YITNLEVKEL

SEQ ID NO: 136835 - protein, 10 aa, Homo Sapiens
YLDEEFHQSL

SEQ ID NO: 136836 - protein, 10 aa, Homo Sapiens
YLNDDQVKEL

SEQ ID NO: 136837 - protein, 10 aa, Homo Sapiens
YLPENKPCYL

SEQ ID NO: 136838 - protein, 10 aa, Homo Sapiens
YLPEWKENIM

SEQ ID NO: 136839 - protein, 10 aa, Homo Sapiens
YLPLAHVLEL

SEQ ID NO: 136840 - protein, 10 aa, Homo Sapiens
YVPEPENSAL

SEQ ID NO: 136841 - protein, 10 aa, Homo Sapiens
YVPQRPYMTL

SEQ ID NO: 136842 - protein, 11 aa, Homo Sapiens
AAPRTVALTAL

SEQ ID NO: 136843 - protein, 11 aa, Homo Sapiens
ATIDPDTISAL

SEQ ID NO: 136844 - protein, 11 aa, Homo Sapiens
CSPGGATIHAL

SEQ ID NO: 136845 - protein, 11 aa, Homo Sapiens
EGNCPERIITL

SEQ ID NO: 136846 - protein, 11 aa, Homo Sapiens
FLPDPSALQNL

SEQ ID NO: 136847 - protein, 11 aa, Homo Sapiens
GLIDTKELEPL

SEQ ID NO: 136848 - protein, 11 aa, Homo Sapiens
IAPDVDTYKEI

SEQ ID NO: 136849 - protein, 11 aa, Homo Sapiens
IAPGGGAFTTL

SEQ ID NO: 136850 - protein, 11 aa, Homo Sapiens
ILHPNGNITEL

SEQ ID NO: 136851 - protein, 11 aa, Homo Sapiens
ISLAPTDVKEL

SEQ ID NO: 136852 - protein, 11 aa, Homo Sapiens
KAPSYLEISSM

SEQ ID NO: 136853 - protein, 11 aa, Homo Sapiens
KSPAGSIVHEL

SEQ ID NO: 136854 - protein, 11 aa, Homo Sapiens
LAPTYLGEFSL

SEQ ID NO: 136855 - protein, 11 aa, Homo Sapiens
LGPAGGDREAL

SEQ ID NO: 136856 - protein, 11 aa, Homo Sapiens
LGPGPGPTTPL

SEQ ID NO: 136857 - protein, 11 aa, Homo Sapiens
LLPPVFNIRSL

SEQ ID NO: 136858 - protein, 11 aa, Homo Sapiens
MAPSETQFSHL

SEQ ID NO: 136859 - protein, 11 aa, Homo Sapiens
QAPLALAHDGV

SEQ ID NO: 136860 - protein, 11 aa, Homo Sapiens
RAPEAELQNCL

SEQ ID NO: 136861 - protein, 11 aa, Homo Sapiens
RLHEYYQPTAL

SEQ ID NO: 136862 - protein, 11 aa, Homo Sapiens
RLPETEMWAEL

SEQ ID NO: 136863 - protein, 11 aa, Homo Sapiens
RLPETIDLGAL

SEQ ID NO: 136864 - protein, 11 aa, Homo Sapiens
RPSSLPVGPVL

SEQ ID NO: 136865 - protein, 11 aa, Homo Sapiens
RSPSSVTGNAL

SEQ ID NO: 136866 - protein, 11 aa, Homo Sapiens
SAPVSERMNAL

SEQ ID NO: 136867 - protein, 11 aa, Homo Sapiens
SIPEAQWHSSL

SEQ ID NO: 136868 - protein, 11 aa, Homo Sapiens
SPLPDRSLPAL

SEQ ID NO: 136869 - protein, 11 aa, Homo Sapiens
SSPAGGGAEAL

SEQ ID NO: 136870 - protein, 11 aa, Homo Sapiens
SSPAGNSPAPL

SEQ ID NO: 136871 - protein, 11 aa, Homo Sapiens
SSPDMNETHPL

SEQ ID NO: 136872 - protein, 11 aa, Homo Sapiens
SSPGGATIHAL

SEQ ID NO: 136873 - protein, 11 aa, Homo Sapiens
TAPQTQHVSPM

SEQ ID NO: 136874 - protein, 11 aa, Homo Sapiens
TLPESSKLSSL

SEQ ID NO: 136875 - protein, 11 aa, Homo Sapiens
VAPGQEKISSL

SEQ ID NO: 136876 - protein, 11 aa, Homo Sapiens
VLPDSGHLHPL

SEQ ID NO: 136877 - protein, 11 aa, Homo Sapiens
YAYDGKDYIAL

SEQ ID NO: 136878 - protein, 11 aa, Homo Sapiens
YLPAHIPYQEL

SEQ ID NO: 136879 - protein, 8 aa, Homo Sapiens
ANALAHRY

SEQ ID NO: 136880 - protein, 8 aa, Homo Sapiens
FAAKQREL

SEQ ID NO: 136881 - protein, 8 aa, Homo Sapiens
FAFSGGLY

SEQ ID NO: 136882 - protein, 8 aa, Homo Sapiens
FAGAAREV

SEQ ID NO: 136883 - protein, 8 aa, Homo Sapiens
FAGLVQEI

SEQ ID NO: 136884 - protein, 8 aa, Homo Sapiens
FAGYVTSI

SEQ ID NO: 136885 - protein, 8 aa, Homo Sapiens
FGADARAL

SEQ ID NO: 136886 - protein, 8 aa, Homo Sapiens
FSFVNPKF

SEQ ID NO: 136887 - protein, 8 aa, Homo Sapiens
FSMEQAGV

SEQ ID NO: 136888 - protein, 8 aa, Homo Sapiens
IAGPVVEI

SEQ ID NO: 136889 - protein, 8 aa, Homo Sapiens
QFTGIKKY

SEQ ID NO: 136890 - protein, 8 aa, Homo Sapiens
SAGEPRVL

SEQ ID NO: 136891 - protein, 8 aa, Homo Sapiens
SAGPMRLY

SEQ ID NO: 136892 - protein, 8 aa, Homo Sapiens
SIFRTNTF

SEQ ID NO: 136893 - protein, 8 aa, Homo Sapiens
SVGPDRKL

SEQ ID NO: 136894 - protein, 8 aa, Homo Sapiens
VAKVGVSM

SEQ ID NO: 136895 - protein, 8 aa, Homo Sapiens
YAANPHSF

SEQ ID NO: 136896 - protein, 9 aa, Homo Sapiens
AAAALPTLY

SEQ ID NO: 136897 - protein, 9 aa, Homo Sapiens
AAAALYQQL

SEQ ID NO: 136898 - protein, 9 aa, Homo Sapiens
AAADIFKHY

SEQ ID NO: 136899 - protein, 9 aa, Homo Sapiens
AAAGGLHEF

SEQ ID NO: 136900 - protein, 9 aa, Homo Sapiens
AAAGLHSNV

SEQ ID NO: 136901 - protein, 9 aa, Homo Sapiens
AAAGVFALL

SEQ ID NO: 136902 - protein, 9 aa, Homo Sapiens
AAAPAGTTF

SEQ ID NO: 136903 - protein, 9 aa, Homo Sapiens
AAAPHTVSY

SEQ ID NO: 136904 - protein, 9 aa, Homo Sapiens
AAAPIISSV

SEQ ID NO: 136905 - protein, 9 aa, Homo Sapiens
AAAPVIKAY

SEQ ID NO: 136906 - protein, 9 aa, Homo Sapiens
AAASKLGEF

SEQ ID NO: 136907 - protein, 9 aa, Homo Sapiens
AAATRTTSF

SEQ ID NO: 136908 - protein, 9 aa, Homo Sapiens
AAAVPRAAF

SEQ ID NO: 136909 - protein, 9 aa, Homo Sapiens
AACDLVQRF

SEQ ID NO: 136910 - protein, 9 aa, Homo Sapiens
AADPQIRQF

SEQ ID NO: 136911 - protein, 9 aa, Homo Sapiens
AAFAYTVKY

SEQ ID NO: 136912 - protein, 9 aa, Homo Sapiens
AAFCKLIVY

SEQ ID NO: 136913 - protein, 9 aa, Homo Sapiens
AAFDHICTF

SEQ ID NO: 136914 - protein, 9 aa, Homo Sapiens
AAFGRDLFL

SEQ ID NO: 136915 - protein, 9 aa, Homo Sapiens
AAFLKAIGY

SEQ ID NO: 136916 - protein, 9 aa, Homo Sapiens
AAFPGASLY

SEQ ID NO: 136917 - protein, 9 aa, Homo Sapiens
AAFPKKLAF

SEQ ID NO: 136918 - protein, 9 aa, Homo Sapiens
AAFTRALEY

SEQ ID NO: 136919 - protein, 9 aa, Homo Sapiens
AAGPTGMFF

SEQ ID NO: 136920 - protein, 9 aa, Homo Sapiens
AAHTVTAAY

SEQ ID NO: 136921 - protein, 9 aa, Homo Sapiens
AAIDHQIEV

SEQ ID NO: 136922 - protein, 9 aa, Homo Sapiens
AAIGLVIYY

SEQ ID NO: 136923 - protein, 9 aa, Homo Sapiens
AAIKQAAGF

SEQ ID NO: 136924 - protein, 9 aa, Homo Sapiens
AAINFQPKM

SEQ ID NO: 136925 - protein, 9 aa, Homo Sapiens
AAIYHVLHF

SEQ ID NO: 136926 - protein, 9 aa, Homo Sapiens
AAKAAGVSF

SEQ ID NO: 136927 - protein, 9 aa, Homo Sapiens
AAKAALEEF

SEQ ID NO: 136928 - protein, 9 aa, Homo Sapiens
AAKCALAYF

SEQ ID NO: 136929 - protein, 9 aa, Homo Sapiens
AAKDKLSEL

SEQ ID NO: 136930 - protein, 9 aa, Homo Sapiens
AAKDKLTEL

SEQ ID NO: 136931 - protein, 9 aa, Homo Sapiens
AAKDLISKL

SEQ ID NO: 136932 - protein, 9 aa, Homo Sapiens
AAKDYNQKL

SEQ ID NO: 136933 - protein, 9 aa, Homo Sapiens
AAKFKTPEL

SEQ ID NO: 136934 - protein, 9 aa, Homo Sapiens
AAKLEPKSF

SEQ ID NO: 136935 - protein, 9 aa, Homo Sapiens
AAKPHNPGF

SEQ ID NO: 136936 - protein, 9 aa, Homo Sapiens
AAKQINIDF

SEQ ID NO: 136937 - protein, 9 aa, Homo Sapiens
AAMPRPVSY

SEQ ID NO: 136938 - protein, 9 aa, Homo Sapiens
AAMSHLLEM

SEQ ID NO: 136939 - protein, 9 aa, Homo Sapiens
AAMSVAKRV

SEQ ID NO: 136940 - protein, 9 aa, Homo Sapiens
AAMSVAQRV

SEQ ID NO: 136941 - protein, 9 aa, Homo Sapiens
AANPHSFVF

SEQ ID NO: 136942 - protein, 9 aa, Homo Sapiens
AANPISGHY

SEQ ID NO: 136943 - protein, 9 aa, Homo Sapiens
AAQDRDQIY

SEQ ID NO: 136944 - protein, 9 aa, Homo Sapiens
AAQEAVKLY

SEQ ID NO: 136945 - protein, 9 aa, Homo Sapiens
AAQFIPKFF

SEQ ID NO: 136946 - protein, 9 aa, Homo Sapiens
AARPATSTL

SEQ ID NO: 136947 - protein, 9 aa, Homo Sapiens
AARSGPLAM

SEQ ID NO: 136948 - protein, 9 aa, Homo Sapiens
AARVIIEKY

SEQ ID NO: 136949 - protein, 9 aa, Homo Sapiens
AASAIYSGY

SEQ ID NO: 136950 - protein, 9 aa, Homo Sapiens
AASGHFICV

SEQ ID NO: 136951 - protein, 9 aa, Homo Sapiens
AASPIITLV

SEQ ID NO: 136952 - protein, 9 aa, Homo Sapiens
AASQINRAY

SEQ ID NO: 136953 - protein, 9 aa, Homo Sapiens
AASSIYSMY

SEQ ID NO: 136954 - protein, 9 aa, Homo Sapiens
AASYIQSKF

SEQ ID NO: 136955 - protein, 9 aa, Homo Sapiens
AATDIARQV

SEQ ID NO: 136956 - protein, 9 aa, Homo Sapiens
AATEIVERV

SEQ ID NO: 136957 - protein, 9 aa, Homo Sapiens
AATPAVRTV

SEQ ID NO: 136958 - protein, 9 aa, Homo Sapiens
AAVGHVLVV

SEQ ID NO: 136959 - protein, 9 aa, Homo Sapiens
AAVPEVAVY

SEQ ID NO: 136960 - protein, 9 aa, Homo Sapiens
AAVSFISKF

SEQ ID NO: 136961 - protein, 9 aa, Homo Sapiens
AAYGYGIRY

SEQ ID NO: 136962 - protein, 9 aa, Homo Sapiens
AAYGYKITE

SEQ ID NO: 136963 - protein, 9 aa, Homo Sapiens
AAYKWLVCY

SEQ ID NO: 136964 - protein, 9 aa, Homo Sapiens
AAYPEIVAV

SEQ ID NO: 136965 - protein, 9 aa, Homo Sapiens
AAYPQVRCY

SEQ ID NO: 136966 - protein, 9 aa, Homo Sapiens
AAYQLAFRY

SEQ ID NO: 136967 - protein, 9 aa, Homo Sapiens
AAYYHPSYL

SEQ ID NO: 136968 - protein, 9 aa, Homo Sapiens
AFLILPELR

SEQ ID NO: 136969 - protein, 9 aa, Homo Sapiens
AGIGRTGTF

SEQ ID NO: 136970 - protein, 9 aa, Homo Sapiens
AIIDILTHY

SEQ ID NO: 136971 - protein, 9 aa, Homo Sapiens
AIIERTASF

SEQ ID NO: 136972 - protein, 9 aa, Homo Sapiens
AIIERVQRY

SEQ ID NO: 136973 - protein, 9 aa, Homo Sapiens
AIVEIFSKY

SEQ ID NO: 136974 - protein, 9 aa, Homo Sapiens
APASGVVPF

SEQ ID NO: 136975 - protein, 9 aa, Homo Sapiens
AQAQLQKRY

SEQ ID NO: 136976 - protein, 9 aa, Homo Sapiens
AQGPTPRYF

SEQ ID NO: 136977 - protein, 9 aa, Homo Sapiens
AQISWVTVF

SEQ ID NO: 136978 - protein, 9 aa, Homo Sapiens
AQKNHIPVF

SEQ ID NO: 136979 - protein, 9 aa, Homo Sapiens
AQVWMITRY

SEQ ID NO: 136980 - protein, 9 aa, Homo Sapiens
ASNPRVTRF

SEQ ID NO: 136981 - protein, 9 aa, Homo Sapiens
ASVGKTSIL

SEQ ID NO: 136982 - protein, 9 aa, Homo Sapiens
ASYPHCLQF

SEQ ID NO: 136983 - protein, 9 aa, Homo Sapiens
ATAAIHSFF

SEQ ID NO: 136984 - protein, 9 aa, Homo Sapiens
ATAPRIKKF

SEQ ID NO: 136985 - protein, 9 aa, Homo Sapiens
ATFPKEIQM

SEQ ID NO: 136986 - protein, 9 aa, Homo Sapiens
ATKARIPFY

SEQ ID NO: 136987 - protein, 9 aa, Homo Sapiens
ATSGVHSNF

SEQ ID NO: 136988 - protein, 9 aa, Homo Sapiens
ATYHRAIKV

SEQ ID NO: 136989 - protein, 9 aa, Homo Sapiens
AVIAPKSSY

SEQ ID NO: 136990 - protein, 9 aa, Homo Sapiens
AVNALQSVY

SEQ ID NO: 136991 - protein, 9 aa, Homo Sapiens
AVNGHTNSF

SEQ ID NO: 136992 - protein, 9 aa, Homo Sapiens
AYNPQLNLK

SEQ ID NO: 136993 - protein, 9 aa, Homo Sapiens
CSSPIVVKF

SEQ ID NO: 136994 - protein, 9 aa, Homo Sapiens
CTYGKPVTF

SEQ ID NO: 136995 - protein, 9 aa, Homo Sapiens
FAADIISVL

SEQ ID NO: 136996 - protein, 9 aa, Homo Sapiens
FAAGYNVKF

SEQ ID NO: 136997 - protein, 9 aa, Homo Sapiens
FAAHLRCTY

SEQ ID NO: 136998 - protein, 9 aa, Homo Sapiens
FAAKFVTSF

SEQ ID NO: 136999 - protein, 9 aa, Homo Sapiens
FAANVYEAF

SEQ ID NO: 137000 - protein, 9 aa, Homo Sapiens
FACEKNENL

SEQ ID NO: 137001 - protein, 9 aa, Homo Sapiens
FACPKTDSL

SEQ ID NO: 137002 - protein, 9 aa, Homo Sapiens
FADPHGKVF

SEQ ID NO: 137003 - protein, 9 aa, Homo Sapiens
FAFDPSVNY

SEQ ID NO: 137004 - protein, 9 aa, Homo Sapiens
FAFEHSEEY

SEQ ID NO: 137005 - protein, 9 aa, Homo Sapiens
FAFFDPVMY

SEQ ID NO: 137006 - protein, 9 aa, Homo Sapiens
FAFRYVTTI

SEQ ID NO: 137007 - protein, 9 aa, Homo Sapiens
FAFVTDNTY

SEQ ID NO: 137008 - protein, 9 aa, Homo Sapiens
FAHEVGHNF

SEQ ID NO: 137009 - protein, 9 aa, Homo Sapiens
FAHHASCHF

SEQ ID NO: 137010 - protein, 9 aa, Homo Sapiens
FAHLINVEF

SEQ ID NO: 137011 - protein, 9 aa, Homo Sapiens
FAHLPKSTF

SEQ ID NO: 137012 - protein, 9 aa, Homo Sapiens
FAHPSLWQL

SEQ ID NO: 137013 - protein, 9 aa, Homo Sapiens
FAHPYQYEL

SEQ ID NO: 137014 - protein, 9 aa, Homo Sapiens
FAIPLIEKL

SEQ ID NO: 137015 - protein, 9 aa, Homo Sapiens
FAIPLIERL

SEQ ID NO: 137016 - protein, 9 aa, Homo Sapiens
FAIQRTTNF

SEQ ID NO: 137017 - protein, 9 aa, Homo Sapiens
FAIYKMSFF

SEQ ID NO: 137018 - protein, 9 aa, Homo Sapiens
FAKEILPKY

SEQ ID NO: 137019 - protein, 9 aa, Homo Sapiens
FAKELQRSF

SEQ ID NO: 137020 - protein, 9 aa, Homo Sapiens
FAKEVLPKY

SEQ ID NO: 137021 - protein, 9 aa, Homo Sapiens
FAKEVSHEM

SEQ ID NO: 137022 - protein, 9 aa, Homo Sapiens
FAKPENIDL

SEQ ID NO: 137023 - protein, 9 aa, Homo Sapiens
FAMEFVKYY

SEQ ID NO: 137024 - protein, 9 aa, Homo Sapiens
FAMFSGTHV

SEQ ID NO: 137025 - protein, 9 aa, Homo Sapiens
FAMPYFIQV

SEQ ID NO: 137026 - protein, 9 aa, Homo Sapiens
FANERCLQL

SEQ ID NO: 137027 - protein, 9 aa, Homo Sapiens
FANGHVNSV

SEQ ID NO: 137028 - protein, 9 aa, Homo Sapiens
FANIDQETY

SEQ ID NO: 137029 - protein, 9 aa, Homo Sapiens
FAQDVGRMF

SEQ ID NO: 137030 - protein, 9 aa, Homo Sapiens
FASGLIHRV

SEQ ID NO: 137031 - protein, 9 aa, Homo Sapiens
FASHVSPEV

SEQ ID NO: 137032 - protein, 9 aa, Homo Sapiens
FASNVVEKC

SEQ ID NO: 137033 - protein, 9 aa, Homo Sapiens
FASPKIDSV

SEQ ID NO: 137034 - protein, 9 aa, Homo Sapiens
FAVPKNYKL

SEQ ID NO: 137035 - protein, 9 aa, Homo Sapiens
FAYEGPMYL

SEQ ID NO: 137036 - protein, 9 aa, Homo Sapiens
FAYHMIETY

SEQ ID NO: 137037 - protein, 9 aa, Homo Sapiens
FAYHYPYTY

SEQ ID NO: 137038 - protein, 9 aa, Homo Sapiens
FAYPAIRYL

SEQ ID NO: 137039 - protein, 9 aa, Homo Sapiens
FAYPSELKA

SEQ ID NO: 137040 - protein, 9 aa, Homo Sapiens
FAYTARISV

SEQ ID NO: 137041 - protein, 9 aa, Homo Sapiens
FAYYRVGEY

SEQ ID NO: 137042 - protein, 9 aa, Homo Sapiens
FFSEKIYKL

SEQ ID NO: 137043 - protein, 9 aa, Homo Sapiens
FGADARALM

SEQ ID NO: 137044 - protein, 9 aa, Homo Sapiens
FGADVVSKF

SEQ ID NO: 137045 - protein, 9 aa, Homo Sapiens
FGATNPKNF

SEQ ID NO: 137046 - protein, 9 aa, Homo Sapiens
FGFHKPKMY

SEQ ID NO: 137047 - protein, 9 aa, Homo Sapiens
FGFPDPKLF

SEQ ID NO: 137048 - protein, 9 aa, Homo Sapiens
FGHVQRAEM

SEQ ID NO: 137049 - protein, 9 aa, Homo Sapiens
FGYPKRLIM

SEQ ID NO: 137050 - protein, 9 aa, Homo Sapiens
FIANLFNRY

SEQ ID NO: 137051 - protein, 9 aa, Homo Sapiens
FIEELFSLM

SEQ ID NO: 137052 - protein, 9 aa, Homo Sapiens
FIIPQIVKY

SEQ ID NO: 137053 - protein, 9 aa, Homo Sapiens
FIIQGLRSV

SEQ ID NO: 137054 - protein, 9 aa, Homo Sapiens
FIISRTQAL

SEQ ID NO: 137055 - protein, 9 aa, Homo Sapiens
FIKDGSSTY

SEQ ID NO: 137056 - protein, 9 aa, Homo Sapiens
FIMGKTIEF

SEQ ID NO: 137057 - protein, 9 aa, Homo Sapiens
FIMGKVPVF

SEQ ID NO: 137058 - protein, 9 aa, Homo Sapiens
FIMPIEVHF

SEQ ID NO: 137059 - protein, 9 aa, Homo Sapiens
FINPKPITY

SEQ ID NO: 137060 - protein, 9 aa, Homo Sapiens
FINQNLRTY

SEQ ID NO: 137061 - protein, 9 aa, Homo Sapiens
FIRVVGSEF

SEQ ID NO: 137062 - protein, 9 aa, Homo Sapiens
FISKKEWYV

SEQ ID NO: 137063 - protein, 9 aa, Homo Sapiens
FITKIISKF

SEQ ID NO: 137064 - protein, 9 aa, Homo Sapiens
FIYHLPQEF

SEQ ID NO: 137065 - protein, 9 aa, Homo Sapiens
FLADIVQKL

SEQ ID NO: 137066 - protein, 9 aa, Homo Sapiens
FLAPLFSSF

SEQ ID NO: 137067 - protein, 9 aa, Homo Sapiens
FLAPLVTEY

SEQ ID NO: 137068 - protein, 9 aa, Homo Sapiens
FLCGVMKTY

SEQ ID NO: 137069 - protein, 9 aa, Homo Sapiens
FLIDRSPEY

SEQ ID NO: 137070 - protein, 9 aa, Homo Sapiens
FLKDLVASV

SEQ ID NO: 137071 - protein, 9 aa, Homo Sapiens
FLKEIVETF

SEQ ID NO: 137072 - protein, 9 aa, Homo Sapiens
FLKEVVETF

SEQ ID NO: 137073 - protein, 9 aa, Homo Sapiens
FLPKMPWSI

SEQ ID NO: 137074 - protein, 9 aa, Homo Sapiens
FLQQPRPLM

SEQ ID NO: 137075 - protein, 9 aa, Homo Sapiens
FLRDKIASY

SEQ ID NO: 137076 - protein, 9 aa, Homo Sapiens
FLYDKALTF

SEQ ID NO: 137077 - protein, 9 aa, Homo Sapiens
FLYPFPLAL

SEQ ID NO: 137078 - protein, 9 aa, Homo Sapiens
FQAEIAQLM

SEQ ID NO: 137079 - protein, 9 aa, Homo Sapiens
FQAHLTKKF

SEQ ID NO: 137080 - protein, 9 aa, Homo Sapiens
FQAPTAKEM

SEQ ID NO: 137081 - protein, 9 aa, Homo Sapiens
FQIDRSWKA

SEQ ID NO: 137082 - protein, 9 aa, Homo Sapiens
FQIGKMRYV

SEQ ID NO: 137083 - protein, 9 aa, Homo Sapiens
FQNKKRVLL

SEQ ID NO: 137084 - protein, 9 aa, Homo Sapiens
FQNPVVTKC

SEQ ID NO: 137085 - protein, 9 aa, Homo Sapiens
FQNTIREMF

SEQ ID NO: 137086 - protein, 9 aa, Homo Sapiens
FQNVQQVEY

SEQ ID NO: 137087 - protein, 9 aa, Homo Sapiens
FQRKAIERF

SEQ ID NO: 137088 - protein, 9 aa, Homo Sapiens
FQRNIKKEY

SEQ ID NO: 137089 - protein, 9 aa, Homo Sapiens
FQRPTIYYV

SEQ ID NO: 137090 - protein, 9 aa, Homo Sapiens
FQYAKESYI

SEQ ID NO: 137091 - protein, 9 aa, Homo Sapiens
FQYESKVFY

SEQ ID NO: 137092 - protein, 9 aa, Homo Sapiens
FSEPFHLIV

SEQ ID NO: 137093 - protein, 9 aa, Homo Sapiens
FSKDIVENY

SEQ ID NO: 137094 - protein, 9 aa, Homo Sapiens
FSKNITATF

SEQ ID NO: 137095 - protein, 9 aa, Homo Sapiens
FSKPSSDTF

SEQ ID NO: 137096 - protein, 9 aa, Homo Sapiens
FSNPNIQKI

SEQ ID NO: 137097 - protein, 9 aa, Homo Sapiens
FSNPRALYL

SEQ ID NO: 137098 - protein, 9 aa, Homo Sapiens
FSNPYSIEY

SEQ ID NO: 137099 - protein, 9 aa, Homo Sapiens
FSSDLQKTF

SEQ ID NO: 137100 - protein, 9 aa, Homo Sapiens
FSSPHLVQV

SEQ ID NO: 137101 - protein, 9 aa, Homo Sapiens
FSYAFPKEF

SEQ ID NO: 137102 - protein, 9 aa, Homo Sapiens
FSYQHAIEE

SEQ ID NO: 137103 - protein, 9 aa, Homo Sapiens
FTAAIISRV

SEQ ID NO: 137104 - protein, 9 aa, Homo Sapiens
FTAKVWDAV

SEQ ID NO: 137105 - protein, 9 aa, Homo Sapiens
FTFSGICRV

SEQ ID NO: 137106 - protein, 9 aa, Homo Sapiens
FTHASPTLF

SEQ ID NO: 137107 - protein, 9 aa, Homo Sapiens
FTHLSLQEF

SEQ ID NO: 137108 - protein, 9 aa, Homo Sapiens
FTIFRTISV

SEQ ID NO: 137109 - protein, 9 aa, Homo Sapiens
FTITKTVEY

SEQ ID NO: 137110 - protein, 9 aa, Homo Sapiens
FTKIMKSKY

SEQ ID NO: 137111 - protein, 9 aa, Homo Sapiens
FTVPHTHVF

SEQ ID NO: 137112 - protein, 9 aa, Homo Sapiens
FTVTFNPKY

SEQ ID NO: 137113 - protein, 9 aa, Homo Sapiens
FVAEQKVEY

SEQ ID NO: 137114 - protein, 9 aa, Homo Sapiens
FVANLFNKY

SEQ ID NO: 137115 - protein, 9 aa, Homo Sapiens
FVHPDPLWI

SEQ ID NO: 137116 - protein, 9 aa, Homo Sapiens
FVKDSGACF

SEQ ID NO: 137117 - protein, 9 aa, Homo Sapiens
FVKDSIRLV

SEQ ID NO: 137118 - protein, 9 aa, Homo Sapiens
FVKKIGGIF

SEQ ID NO: 137119 - protein, 9 aa, Homo Sapiens
FVKPAFEEF

SEQ ID NO: 137120 - protein, 9 aa, Homo Sapiens
FVKPAVVTV

SEQ ID NO: 137121 - protein, 9 aa, Homo Sapiens
FVNKFNVLY

SEQ ID NO: 137122 - protein, 9 aa, Homo Sapiens
FVNPHVSSF

SEQ ID NO: 137123 - protein, 9 aa, Homo Sapiens
FVRDMIREV

SEQ ID NO: 137124 - protein, 9 aa, Homo Sapiens
GAAGVHFIY

SEQ ID NO: 137125 - protein, 9 aa, Homo Sapiens
GADGSVRMF

SEQ ID NO: 137126 - protein, 9 aa, Homo Sapiens
GAFGLPITV

SEQ ID NO: 137127 - protein, 9 aa, Homo Sapiens
GAHGIIVVY

SEQ ID NO: 137128 - protein, 9 aa, Homo Sapiens
GAVGFFTHY

SEQ ID NO: 137129 - protein, 9 aa, Homo Sapiens
GAVTKTHVM

SEQ ID NO: 137130 - protein, 9 aa, Homo Sapiens
GAYGQAVRY

SEQ ID NO: 137131 - protein, 9 aa, Homo Sapiens
GAYGTPQKY

SEQ ID NO: 137132 - protein, 9 aa, Homo Sapiens
GAYKYIQEL

SEQ ID NO: 137133 - protein, 9 aa, Homo Sapiens
GAYTVTIKY

SEQ ID NO: 137134 - protein, 9 aa, Homo Sapiens
GIYPHKLVF

SEQ ID NO: 137135 - protein, 9 aa, Homo Sapiens
GQNKKVMIY

SEQ ID NO: 137136 - protein, 9 aa, Homo Sapiens
GTAMIFTCF

SEQ ID NO: 137137 - protein, 9 aa, Homo Sapiens
GVIKRTENV

SEQ ID NO: 137138 - protein, 9 aa, Homo Sapiens
GVIQPGRGF

SEQ ID NO: 137139 - protein, 9 aa, Homo Sapiens
GVKSVGQGY

SEQ ID NO: 137140 - protein, 9 aa, Homo Sapiens
HAAGFAYTY

SEQ ID NO: 137141 - protein, 9 aa, Homo Sapiens
HAAHIISEL

SEQ ID NO: 137142 - protein, 9 aa, Homo Sapiens
HAFGSATQF

SEQ ID NO: 137143 - protein, 9 aa, Homo Sapiens
HAIDIICGF

SEQ ID NO: 137144 - protein, 9 aa, Homo Sapiens
HAIKSVKIY

SEQ ID NO: 137145 - protein, 9 aa, Homo Sapiens
HAMEEVKKF

SEQ ID NO: 137146 - protein, 9 aa, Homo Sapiens
HAYIHSVQF

SEQ ID NO: 137147 - protein, 9 aa, Homo Sapiens
HAYPYPQMY

SEQ ID NO: 137148 - protein, 9 aa, Homo Sapiens
HGIDPTGTY

SEQ ID NO: 137149 - protein, 9 aa, Homo Sapiens
HIIGRIESY

SEQ ID NO: 137150 - protein, 9 aa, Homo Sapiens
HIMEIFSTY

SEQ ID NO: 137151 - protein, 9 aa, Homo Sapiens
HQITVLHVY

SEQ ID NO: 137152 - protein, 9 aa, Homo Sapiens
HQYDGLVEL

SEQ ID NO: 137153 - protein, 9 aa, Homo Sapiens
HTADISSHF

SEQ ID NO: 137154 - protein, 9 aa, Homo Sapiens
HTFLPKIFF

SEQ ID NO: 137155 - protein, 9 aa, Homo Sapiens
HTIGKTVEY

SEQ ID NO: 137156 - protein, 9 aa, Homo Sapiens
HVNGIVQKY

SEQ ID NO: 137157 - protein, 9 aa, Homo Sapiens
IAADILIKE

SEQ ID NO: 137158 - protein, 9 aa, Homo Sapiens
IAAGIFNDL

SEQ ID NO: 137159 - protein, 9 aa, Homo Sapiens
IAAKKVLRL

SEQ ID NO: 137160 - protein, 9 aa, Homo Sapiens
IAAPFTSKL

SEQ ID NO: 137161 - protein, 9 aa, Homo Sapiens
IAFGFHQLY

SEQ ID NO: 137162 - protein, 9 aa, Homo Sapiens
IAFPKAEEL

SEQ ID NO: 137163 - protein, 9 aa, Homo Sapiens
IAFPTSISV

SEQ ID NO: 137164 - protein, 9 aa, Homo Sapiens
IAFSRPVKY

SEQ ID NO: 137165 - protein, 9 aa, Homo Sapiens
IAGYVTHLM

SEQ ID NO: 137166 - protein, 9 aa, Homo Sapiens
IAIGKVLKL

SEQ ID NO: 137167 - protein, 9 aa, Homo Sapiens
IAIPFLIKL

SEQ ID NO: 137168 - protein, 9 aa, Homo Sapiens
IAIPVTVAF

SEQ ID NO: 137169 - protein, 9 aa, Homo Sapiens
IAISRTPVL

SEQ ID NO: 137170 - protein, 9 aa, Homo Sapiens
IAKHIDAEY

SEQ ID NO: 137171 - protein, 9 aa, Homo Sapiens
IAKKTTPLL

SEQ ID NO: 137172 - protein, 9 aa, Homo Sapiens
IAKSGTKAF

SEQ ID NO: 137173 - protein, 9 aa, Homo Sapiens
IAKSGTSEF

SEQ ID NO: 137174 - protein, 9 aa, Homo Sapiens
IASDIVSRF

SEQ ID NO: 137175 - protein, 9 aa, Homo Sapiens
IAVGHIYFF

SEQ ID NO: 137176 - protein, 9 aa, Homo Sapiens
IAVGHIYYF

SEQ ID NO: 137177 - protein, 9 aa, Homo Sapiens
IAVGIMSYY

SEQ ID NO: 137178 - protein, 9 aa, Homo Sapiens
IAVGTVIRY

SEQ ID NO: 137179 - protein, 9 aa, Homo Sapiens
IAYPKAVTM

SEQ ID NO: 137180 - protein, 9 aa, Homo Sapiens
IIAEPGRYY

SEQ ID NO: 137181 - protein, 9 aa, Homo Sapiens
IIAPPERKY

SEQ ID NO: 137182 - protein, 9 aa, Homo Sapiens
IIHDFPQFY

SEQ ID NO: 137183 - protein, 9 aa, Homo Sapiens
IISSVIQKF

SEQ ID NO: 137184 - protein, 9 aa, Homo Sapiens
ILGPPGSVY

SEQ ID NO: 137185 - protein, 9 aa, Homo Sapiens
IQAGIFQEF

SEQ ID NO: 137186 - protein, 9 aa, Homo Sapiens
ISKALVAYY

SEQ ID NO: 137187 - protein, 9 aa, Homo Sapiens
ISPVTKSSF

SEQ ID NO: 137188 - protein, 9 aa, Homo Sapiens
ISTPVIRTF

SEQ ID NO: 137189 - protein, 9 aa, Homo Sapiens
ITKVRTPVM

SEQ ID NO: 137190 - protein, 9 aa, Homo Sapiens
IVKKPGNIY

SEQ ID NO: 137191 - protein, 9 aa, Homo Sapiens
IVPGNVKSL

SEQ ID NO: 137192 - protein, 9 aa, Homo Sapiens
KAADIASKV

SEQ ID NO: 137193 - protein, 9 aa, Homo Sapiens
KAAPCIYWL

SEQ ID NO: 137194 - protein, 9 aa, Homo Sapiens
KACTIAIRY

SEQ ID NO: 137195 - protein, 9 aa, Homo Sapiens
KAFARPWSL

SEQ ID NO: 137196 - protein, 9 aa, Homo Sapiens
KAFDFPSSF

SEQ ID NO: 137197 - protein, 9 aa, Homo Sapiens
KAFDRPSLF

SEQ ID NO: 137198 - protein, 9 aa, Homo Sapiens
KAFDYPSRF

SEQ ID NO: 137199 - protein, 9 aa, Homo Sapiens
KAFPFHIIF

SEQ ID NO: 137200 - protein, 9 aa, Homo Sapiens
KAFPGIISE

SEQ ID NO: 137201 - protein, 9 aa, Homo Sapiens
KAGPIWDLR

SEQ ID NO: 137202 - protein, 9 aa, Homo Sapiens
KAIELLQEF

SEQ ID NO: 137203 - protein, 9 aa, Homo Sapiens
KAISGVHTV

SEQ ID NO: 137204 - protein, 9 aa, Homo Sapiens
KAITFVTQY

SEQ ID NO: 137205 - protein, 9 aa, Homo Sapiens
KAKEIYMTF

SEQ ID NO: 137206 - protein, 9 aa, Homo Sapiens
KAMGIMNSF

SEQ ID NO: 137207 - protein, 9 aa, Homo Sapiens
KANPALYVL

SEQ ID NO: 137208 - protein, 9 aa, Homo Sapiens
KARGDLGAF

SEQ ID NO: 137209 - protein, 9 aa, Homo Sapiens
KASDAFHFF

SEQ ID NO: 137210 - protein, 9 aa, Homo Sapiens
KATNVCTRF

SEQ ID NO: 137211 - protein, 9 aa, Homo Sapiens
KAVSLFLCY

SEQ ID NO: 137212 - protein, 9 aa, Homo Sapiens
KAYFDVKEY

SEQ ID NO: 137213 - protein, 9 aa, Homo Sapiens
KAYGASKTF

SEQ ID NO: 137214 - protein, 9 aa, Homo Sapiens
KIKEIAVTV

SEQ ID NO: 137215 - protein, 9 aa, Homo Sapiens
KISNIIKQF

SEQ ID NO: 137216 - protein, 9 aa, Homo Sapiens
KLPDIFSVY

SEQ ID NO: 137217 - protein, 9 aa, Homo Sapiens
KMKLNETSF

SEQ ID NO: 137218 - protein, 9 aa, Homo Sapiens
KQAEIVKRL

SEQ ID NO: 137219 - protein, 9 aa, Homo Sapiens
KQFHRIVTY

SEQ ID NO: 137220 - protein, 9 aa, Homo Sapiens
KQFPEVIKY

SEQ ID NO: 137221 - protein, 9 aa, Homo Sapiens
KSIARVLTV

SEQ ID NO: 137222 - protein, 9 aa, Homo Sapiens
KSSDIAKTF

SEQ ID NO: 137223 - protein, 9 aa, Homo Sapiens
KSVDWLLVF

SEQ ID NO: 137224 - protein, 9 aa, Homo Sapiens
KTFDHYCEY

SEQ ID NO: 137225 - protein, 9 aa, Homo Sapiens
KTIDKKTFY

SEQ ID NO: 137226 - protein, 9 aa, Homo Sapiens
KTPDFILQV

SEQ ID NO: 137227 - protein, 9 aa, Homo Sapiens
KVANLVKAY

SEQ ID NO: 137228 - protein, 9 aa, Homo Sapiens
KVSSINSRF

SEQ ID NO: 137229 - protein, 9 aa, Homo Sapiens
KYFDEHYEY

SEQ ID NO: 137230 - protein, 9 aa, Homo Sapiens
LAAGHLVQL

SEQ ID NO: 137231 - protein, 9 aa, Homo Sapiens
LAFPGEMLL

SEQ ID NO: 137232 - protein, 9 aa, Homo Sapiens
LAFSRALEL

SEQ ID NO: 137233 - protein, 9 aa, Homo Sapiens
LAIKRCKHF

SEQ ID NO: 137234 - protein, 9 aa, Homo Sapiens
LAINHAYFY

SEQ ID NO: 137235 - protein, 9 aa, Homo Sapiens
LAIYEPKTF

SEQ ID NO: 137236 - protein, 9 aa, Homo Sapiens
LAKDGVLTL

SEQ ID NO: 137237 - protein, 9 aa, Homo Sapiens
LAKEVGTSY

SEQ ID NO: 137238 - protein, 9 aa, Homo Sapiens
LAKGGTVEY

SEQ ID NO: 137239 - protein, 9 aa, Homo Sapiens
LALIIMKIL

SEQ ID NO: 137240 - protein, 9 aa, Homo Sapiens
LANGDVWKV

SEQ ID NO: 137241 - protein, 9 aa, Homo Sapiens
LANKLITVY

SEQ ID NO: 137242 - protein, 9 aa, Homo Sapiens
LARDFLDEY

SEQ ID NO: 137243 - protein, 9 aa, Homo Sapiens
LARIIDSEY

SEQ ID NO: 137244 - protein, 9 aa, Homo Sapiens
LARPLPVEY

SEQ ID NO: 137245 - protein, 9 aa, Homo Sapiens
LASKEIHQF

SEQ ID NO: 137246 - protein, 9 aa, Homo Sapiens
LASPIYTHF

SEQ ID NO: 137247 - protein, 9 aa, Homo Sapiens
LASSLLDRF

SEQ ID NO: 137248 - protein, 9 aa, Homo Sapiens
LASYVHYVF

SEQ ID NO: 137249 - protein, 9 aa, Homo Sapiens
LATASSPKF

SEQ ID NO: 137250 - protein, 9 aa, Homo Sapiens
LAVPFCVNF

SEQ ID NO: 137251 - protein, 9 aa, Homo Sapiens
LAYIHLIEF

SEQ ID NO: 137252 - protein, 9 aa, Homo Sapiens
LHYPIDSLT

SEQ ID NO: 137253 - protein, 9 aa, Homo Sapiens
LIYGRPVYV

SEQ ID NO: 137254 - protein, 9 aa, Homo Sapiens
LLADITSKY

SEQ ID NO: 137255 - protein, 9 aa, Homo Sapiens
LLKSPGACF

SEQ ID NO: 137256 - protein, 9 aa, Homo Sapiens
LREDGALSI

SEQ ID NO: 137257 - protein, 9 aa, Homo Sapiens
LSAPIHTQM

SEQ ID NO: 137258 - protein, 9 aa, Homo Sapiens
LSAPIMSRF

SEQ ID NO: 137259 - protein, 9 aa, Homo Sapiens
LSFPTTKTY

SEQ ID NO: 137260 - protein, 9 aa, Homo Sapiens
LSFTHPISF

SEQ ID NO: 137261 - protein, 9 aa, Homo Sapiens
LSGSYVVYT

SEQ ID NO: 137262 - protein, 9 aa, Homo Sapiens
LSKDDIENM

SEQ ID NO: 137263 - protein, 9 aa, Homo Sapiens
LSKDSILSL

SEQ ID NO: 137264 - protein, 9 aa, Homo Sapiens
LSKGPGLEV

SEQ ID NO: 137265 - protein, 9 aa, Homo Sapiens
LSNTVMPRF

SEQ ID NO: 137266 - protein, 9 aa, Homo Sapiens
LTDAIYDII

SEQ ID NO: 137267 - protein, 9 aa, Homo Sapiens
LTFPHPVYY

SEQ ID NO: 137268 - protein, 9 aa, Homo Sapiens
MAFGKPAKY

SEQ ID NO: 137269 - protein, 9 aa, Homo Sapiens
MASKILKSY

SEQ ID NO: 137270 - protein, 9 aa, Homo Sapiens
MAYGGKLKY

SEQ ID NO: 137271 - protein, 9 aa, Homo Sapiens
MAYGHIDSY

SEQ ID NO: 137272 - protein, 9 aa, Homo Sapiens
MSKAPSNTF

SEQ ID NO: 137273 - protein, 9 aa, Homo Sapiens
MTKKPGMFF

SEQ ID NO: 137274 - protein, 9 aa, Homo Sapiens
NAAAIYDLL

SEQ ID NO: 137275 - protein, 9 aa, Homo Sapiens
NADPNMKLF

SEQ ID NO: 137276 - protein, 9 aa, Homo Sapiens
NASPVISSV

SEQ ID NO: 137277 - protein, 9 aa, Homo Sapiens
NATGVAMLF

SEQ ID NO: 137278 - protein, 9 aa, Homo Sapiens
NAVNLAIKY

SEQ ID NO: 137279 - protein, 9 aa, Homo Sapiens
NAYAKVCLY

SEQ ID NO: 137280 - protein, 9 aa, Homo Sapiens
NQIPFIIQY

SEQ ID NO: 137281 - protein, 9 aa, Homo Sapiens
NTIPFIIRY

SEQ ID NO: 137282 - protein, 9 aa, Homo Sapiens
PPKYAKTLY

SEQ ID NO: 137283 - protein, 9 aa, Homo Sapiens
PSIVHRKCF

SEQ ID NO: 137284 - protein, 9 aa, Homo Sapiens
QAASILTKF

SEQ ID NO: 137285 - protein, 9 aa, Homo Sapiens
QAERIFSEV

SEQ ID NO: 137286 - protein, 9 aa, Homo Sapiens
QAIQWILHY

SEQ ID NO: 137287 - protein, 9 aa, Homo Sapiens
QAMGKTSFF

SEQ ID NO: 137288 - protein, 9 aa, Homo Sapiens
QAPQPQSSL

SEQ ID NO: 137289 - protein, 9 aa, Homo Sapiens
QAYSGIQQY

SEQ ID NO: 137290 - protein, 9 aa, Homo Sapiens
QIPEIKQTL

SEQ ID NO: 137291 - protein, 9 aa, Homo Sapiens
QSTTRLTEM

SEQ ID NO: 137292 - protein, 9 aa, Homo Sapiens
RAAKKLWKV

SEQ ID NO: 137293 - protein, 9 aa, Homo Sapiens
RAAPFSLEY

SEQ ID NO: 137294 - protein, 9 aa, Homo Sapiens
RAFASATNY

SEQ ID NO: 137295 - protein, 9 aa, Homo Sapiens
RAFDVPKRY

SEQ ID NO: 137296 - protein, 9 aa, Homo Sapiens
RAFEYEIRF

SEQ ID NO: 137297 - protein, 9 aa, Homo Sapiens
RAFGIPIRV

SEQ ID NO: 137298 - protein, 9 aa, Homo Sapiens
RAFPLPMSF

SEQ ID NO: 137299 - protein, 9 aa, Homo Sapiens
RAFPNKQGY

SEQ ID NO: 137300 - protein, 9 aa, Homo Sapiens
RAGPTAVYF

SEQ ID NO: 137301 - protein, 9 aa, Homo Sapiens
RAIDKCWKI

SEQ ID NO: 137302 - protein, 9 aa, Homo Sapiens
RAIEIYTDM

SEQ ID NO: 137303 - protein, 9 aa, Homo Sapiens
RAIGILSRF

SEQ ID NO: 137304 - protein, 9 aa, Homo Sapiens
RAINIALQL

SEQ ID NO: 137305 - protein, 9 aa, Homo Sapiens
RAIRPPRHF

SEQ ID NO: 137306 - protein, 9 aa, Homo Sapiens
RAITETHAF

SEQ ID NO: 137307 - protein, 9 aa, Homo Sapiens
RAKEYLEFF

SEQ ID NO: 137308 - protein, 9 aa, Homo Sapiens
RAKQPPSTF

SEQ ID NO: 137309 - protein, 9 aa, Homo Sapiens
RAMFHDKKF

SEQ ID NO: 137310 - protein, 9 aa, Homo Sapiens
RARELLVSY

SEQ ID NO: 137311 - protein, 9 aa, Homo Sapiens
RARYLAEKY

SEQ ID NO: 137312 - protein, 9 aa, Homo Sapiens
RASLLLKTY

SEQ ID NO: 137313 - protein, 9 aa, Homo Sapiens
RASPVNDIF

SEQ ID NO: 137314 - protein, 9 aa, Homo Sapiens
RASWIAQVF

SEQ ID NO: 137315 - protein, 9 aa, Homo Sapiens
RATPHPSEL

SEQ ID NO: 137316 - protein, 9 aa, Homo Sapiens
RAYAKALHY

SEQ ID NO: 137317 - protein, 9 aa, Homo Sapiens
RAYAKDVKF

SEQ ID NO: 137318 - protein, 9 aa, Homo Sapiens
RAYGRDIVE

SEQ ID NO: 137319 - protein, 9 aa, Homo Sapiens
RAYPAAITI

SEQ ID NO: 137320 - protein, 9 aa, Homo Sapiens
RAYPTVKFY

SEQ ID NO: 137321 - protein, 9 aa, Homo Sapiens
RIADISQVY

SEQ ID NO: 137322 - protein, 9 aa, Homo Sapiens
RIHFPLATY

SEQ ID NO: 137323 - protein, 9 aa, Homo Sapiens
RIKAINTFF

SEQ ID NO: 137324 - protein, 9 aa, Homo Sapiens
RISGVDRYY

SEQ ID NO: 137325 - protein, 9 aa, Homo Sapiens
RLSKLIKKF

SEQ ID NO: 137326 - protein, 9 aa, Homo Sapiens
RQADFVQVL

SEQ ID NO: 137327 - protein, 9 aa, Homo Sapiens
RQADKVWRL

SEQ ID NO: 137328 - protein, 9 aa, Homo Sapiens
RQIDFVLSY

SEQ ID NO: 137329 - protein, 9 aa, Homo Sapiens
RQIKHMIKY

SEQ ID NO: 137330 - protein, 9 aa, Homo Sapiens
RQINWTVLY

SEQ ID NO: 137331 - protein, 9 aa, Homo Sapiens
RQTTITSHF

SEQ ID NO: 137332 - protein, 9 aa, Homo Sapiens
RQYAKDIGF

SEQ ID NO: 137333 - protein, 9 aa, Homo Sapiens
RQYPEVIKY

SEQ ID NO: 137334 - protein, 9 aa, Homo Sapiens
RSSGRVYYF

SEQ ID NO: 137335 - protein, 9 aa, Homo Sapiens
RTFGHLLRY

SEQ ID NO: 137336 - protein, 9 aa, Homo Sapiens
RTMEIESTF

SEQ ID NO: 137337 - protein, 9 aa, Homo Sapiens
RTVEKTWKL

SEQ ID NO: 137338 - protein, 9 aa, Homo Sapiens
RVFPSPMRI

SEQ ID NO: 137339 - protein, 9 aa, Homo Sapiens
RVFPYSVFY

SEQ ID NO: 137340 - protein, 9 aa, Homo Sapiens
RVKEIGSTM

SEQ ID NO: 137341 - protein, 9 aa, Homo Sapiens
RVKEIYNTY

SEQ ID NO: 137342 - protein, 9 aa, Homo Sapiens
RVQGFQVEY

SEQ ID NO: 137343 - protein, 9 aa, Homo Sapiens
RVVDIYSKF

SEQ ID NO: 137344 - protein, 9 aa, Homo Sapiens
RVYPQAVYF

SEQ ID NO: 137345 - protein, 9 aa, Homo Sapiens
SAAAVFSHF

SEQ ID NO: 137346 - protein, 9 aa, Homo Sapiens
SAADFFSHY

SEQ ID NO: 137347 - protein, 9 aa, Homo Sapiens
SAAFAVKLF

SEQ ID NO: 137348 - protein, 9 aa, Homo Sapiens
SAANIQPIF

SEQ ID NO: 137349 - protein, 9 aa, Homo Sapiens
SAAPFAQRY

SEQ ID NO: 137350 - protein, 9 aa, Homo Sapiens
SAAPFFVLF

SEQ ID NO: 137351 - protein, 9 aa, Homo Sapiens
SAAQPGVAF

SEQ ID NO: 137352 - protein, 9 aa, Homo Sapiens
SAASEQHVF

SEQ ID NO: 137353 - protein, 9 aa, Homo Sapiens
SAASICAKV

SEQ ID NO: 137354 - protein, 9 aa, Homo Sapiens
SAASITPLL

SEQ ID NO: 137355 - protein, 9 aa, Homo Sapiens
SAASLTSKY

SEQ ID NO: 137356 - protein, 9 aa, Homo Sapiens
SAASLYPVL

SEQ ID NO: 137357 - protein, 9 aa, Homo Sapiens
SACGHTAVL

SEQ ID NO: 137358 - protein, 9 aa, Homo Sapiens
SACGKTFRY

SEQ ID NO: 137359 - protein, 9 aa, Homo Sapiens
SACIKVTKY

SEQ ID NO: 137360 - protein, 9 aa, Homo Sapiens
SACKNILRF

SEQ ID NO: 137361 - protein, 9 aa, Homo Sapiens
SACPFSSKF

SEQ ID NO: 137362 - protein, 9 aa, Homo Sapiens
SADEVQRFF

SEQ ID NO: 137363 - protein, 9 aa, Homo Sapiens
SAFGQIYKV

SEQ ID NO: 137364 - protein, 9 aa, Homo Sapiens
SAFGRALRY

SEQ ID NO: 137365 - protein, 9 aa, Homo Sapiens
SAFNLLMHY

SEQ ID NO: 137366 - protein, 9 aa, Homo Sapiens
SAFPFPVTV

SEQ ID NO: 137367 - protein, 9 aa, Homo Sapiens
SAFPSNIFY

SEQ ID NO: 137368 - protein, 9 aa, Homo Sapiens
SAFPYAHRF

SEQ ID NO: 137369 - protein, 9 aa, Homo Sapiens
SAFSGPYKF

SEQ ID NO: 137370 - protein, 9 aa, Homo Sapiens
SAFSRIMKL

SEQ ID NO: 137371 - protein, 9 aa, Homo Sapiens
SAFTNRIFF

SEQ ID NO: 137372 - protein, 9 aa, Homo Sapiens
SAFYDSELF

SEQ ID NO: 137373 - protein, 9 aa, Homo Sapiens
SAHAGTYEV

SEQ ID NO: 137374 - protein, 9 aa, Homo Sapiens
SAHNLQSVF

SEQ ID NO: 137375 - protein, 9 aa, Homo Sapiens
SAIASTKVM

SEQ ID NO: 137376 - protein, 9 aa, Homo Sapiens
SAIGKILKF

SEQ ID NO: 137377 - protein, 9 aa, Homo Sapiens
SAIPHPLIM

SEQ ID NO: 137378 - protein, 9 aa, Homo Sapiens
SAITKPWEV

SEQ ID NO: 137379 - protein, 9 aa, Homo Sapiens
SAKFASCFY

SEQ ID NO: 137380 - protein, 9 aa, Homo Sapiens
SAKHIFKTY

SEQ ID NO: 137381 - protein, 9 aa, Homo Sapiens
SAKPEISAM

SEQ ID NO: 137382 - protein, 9 aa, Homo Sapiens
SAKPQTTVF

SEQ ID NO: 137383 - protein, 9 aa, Homo Sapiens
SAKSGAVTF

SEQ ID NO: 137384 - protein, 9 aa, Homo Sapiens
SAKSPTATF

SEQ ID NO: 137385 - protein, 9 aa, Homo Sapiens
SAKTPGFSV

SEQ ID NO: 137386 - protein, 9 aa, Homo Sapiens
SAKVKIAEF

SEQ ID NO: 137387 - protein, 9 aa, Homo Sapiens
SAMGSATRY

SEQ ID NO: 137388 - protein, 9 aa, Homo Sapiens
SAMKEFAYM

SEQ ID NO: 137389 - protein, 9 aa, Homo Sapiens
SAMMVESRY

SEQ ID NO: 137390 - protein, 9 aa, Homo Sapiens
SAMPTVRSF

SEQ ID NO: 137391 - protein, 9 aa, Homo Sapiens
SAMSNPRAM

SEQ ID NO: 137392 - protein, 9 aa, Homo Sapiens
SAMYSRKAM

SEQ ID NO: 137393 - protein, 9 aa, Homo Sapiens
SANADFANF

SEQ ID NO: 137394 - protein, 9 aa, Homo Sapiens
SANHNILQI

SEQ ID NO: 137395 - protein, 9 aa, Homo Sapiens
SANVSKVSF

SEQ ID NO: 137396 - protein, 9 aa, Homo Sapiens
SAQGKPLAL

SEQ ID NO: 137397 - protein, 9 aa, Homo Sapiens
SASDVHGNF

SEQ ID NO: 137398 - protein, 9 aa, Homo Sapiens
SASFLPKYF

SEQ ID NO: 137399 - protein, 9 aa, Homo Sapiens
SASGIYGNF

SEQ ID NO: 137400 - protein, 9 aa, Homo Sapiens
SASPHAAYY

SEQ ID NO: 137401 - protein, 9 aa, Homo Sapiens
SASPIFTHV

SEQ ID NO: 137402 - protein, 9 aa, Homo Sapiens
SATSVHTSV

SEQ ID NO: 137403 - protein, 9 aa, Homo Sapiens
SATYIAEEY

SEQ ID NO: 137404 - protein, 9 aa, Homo Sapiens
SAVGKIMKF

SEQ ID NO: 137405 - protein, 9 aa, Homo Sapiens
SAVNIIRTF

SEQ ID NO: 137406 - protein, 9 aa, Homo Sapiens
SAVPKVMKV

SEQ ID NO: 137407 - protein, 9 aa, Homo Sapiens
SAVPSTSTM

SEQ ID NO: 137408 - protein, 9 aa, Homo Sapiens
SAVTFVLTY

SEQ ID NO: 137409 - protein, 9 aa, Homo Sapiens
SAYAKSEEF

SEQ ID NO: 137410 - protein, 9 aa, Homo Sapiens
SAYAQIVQF

SEQ ID NO: 137411 - protein, 9 aa, Homo Sapiens
SAYARLIDY

SEQ ID NO: 137412 - protein, 9 aa, Homo Sapiens
SAYGSVKAY

SEQ ID NO: 137413 - protein, 9 aa, Homo Sapiens
SAYKRAAQF

SEQ ID NO: 137414 - protein, 9 aa, Homo Sapiens
SAYPHRLNL

SEQ ID NO: 137415 - protein, 9 aa, Homo Sapiens
SAYQHPASF

SEQ ID NO: 137416 - protein, 9 aa, Homo Sapiens
SAYQHPTTF

SEQ ID NO: 137417 - protein, 9 aa, Homo Sapiens
SAYQSITHY

SEQ ID NO: 137418 - protein, 9 aa, Homo Sapiens
SAYSDIVKM

SEQ ID NO: 137419 - protein, 9 aa, Homo Sapiens
SAYSGKVRY

SEQ ID NO: 137420 - protein, 9 aa, Homo Sapiens
SAYYALTKF

SEQ ID NO: 137421 - protein, 9 aa, Homo Sapiens
SGGPGPRVY

SEQ ID NO: 137422 - protein, 9 aa, Homo Sapiens
SGMGKTAVF

SEQ ID NO: 137423 - protein, 9 aa, Homo Sapiens
SGPGPAAAL

SEQ ID NO: 137424 - protein, 9 aa, Homo Sapiens
SIESIHSEM

SEQ ID NO: 137425 - protein, 9 aa, Homo Sapiens
SIIGRLLEV

SEQ ID NO: 137426 - protein, 9 aa, Homo Sapiens
SIKDRMAKY

SEQ ID NO: 137427 - protein, 9 aa, Homo Sapiens
SINGAITQF

SEQ ID NO: 137428 - protein, 9 aa, Homo Sapiens
SIPKGNSAL

SEQ ID NO: 137429 - protein, 9 aa, Homo Sapiens
SIRDGVRAY

SEQ ID NO: 137430 - protein, 9 aa, Homo Sapiens
SITRLIKKY

SEQ ID NO: 137431 - protein, 9 aa, Homo Sapiens
SPGAAVVML

SEQ ID NO: 137432 - protein, 9 aa, Homo Sapiens
SQADIKKAY

SEQ ID NO: 137433 - protein, 9 aa, Homo Sapiens
SQCQKLWKL

SEQ ID NO: 137434 - protein, 9 aa, Homo Sapiens
SQFGGGSQY

SEQ ID NO: 137435 - protein, 9 aa, Homo Sapiens
SQHYHQGYY

SEQ ID NO: 137436 - protein, 9 aa, Homo Sapiens
SQYPFPVTL

SEQ ID NO: 137437 - protein, 9 aa, Homo Sapiens
SQYQGVVVY

SEQ ID NO: 137438 - protein, 9 aa, Homo Sapiens
SSADIRKAY

SEQ ID NO: 137439 - protein, 9 aa, Homo Sapiens
SSHVTNVSF

SEQ ID NO: 137440 - protein, 9 aa, Homo Sapiens
SSPAPRTAL

SEQ ID NO: 137441 - protein, 9 aa, Homo Sapiens
SSQGTVRFF

SEQ ID NO: 137442 - protein, 9 aa, Homo Sapiens
SSSSLEKSY

SEQ ID NO: 137443 - protein, 9 aa, Homo Sapiens
SSTPIAPVF

SEQ ID NO: 137444 - protein, 9 aa, Homo Sapiens
STRDHLQTM

SEQ ID NO: 137445 - protein, 9 aa, Homo Sapiens
STYGRTPMY

SEQ ID NO: 137446 - protein, 9 aa, Homo Sapiens
SVASIKTGF

SEQ ID NO: 137447 - protein, 9 aa, Homo Sapiens
SVIDYQTHF

SEQ ID NO: 137448 - protein, 9 aa, Homo Sapiens
SVISHLLRV

SEQ ID NO: 137449 - protein, 9 aa, Homo Sapiens
SVKPASSSF

SEQ ID NO: 137450 - protein, 9 aa, Homo Sapiens
SVRSNLTSF

SEQ ID NO: 137451 - protein, 9 aa, Homo Sapiens
TAAAVGAVF

SEQ ID NO: 137452 - protein, 9 aa, Homo Sapiens
TAADIFKQY

SEQ ID NO: 137453 - protein, 9 aa, Homo Sapiens
TAFPGTGGF

SEQ ID NO: 137454 - protein, 9 aa, Homo Sapiens
TAHQINIGY

SEQ ID NO: 137455 - protein, 9 aa, Homo Sapiens
TAIGHINRY

SEQ ID NO: 137456 - protein, 9 aa, Homo Sapiens
TAKSVTCTY

SEQ ID NO: 137457 - protein, 9 aa, Homo Sapiens
TAMFIASKY

SEQ ID NO: 137458 - protein, 9 aa, Homo Sapiens
TASGVFSKF

SEQ ID NO: 137459 - protein, 9 aa, Homo Sapiens
TASPVIKAV

SEQ ID NO: 137460 - protein, 9 aa, Homo Sapiens
TAVYKVSEY

SEQ ID NO: 137461 - protein, 9 aa, Homo Sapiens
TAYPGQTQY

SEQ ID NO: 137462 - protein, 9 aa, Homo Sapiens
TIMAHVTEF

SEQ ID NO: 137463 - protein, 9 aa, Homo Sapiens
TINGHNAEV

SEQ ID NO: 137464 - protein, 9 aa, Homo Sapiens
VAAPLFELY

SEQ ID NO: 137465 - protein, 9 aa, Homo Sapiens
VAASNIVQM

SEQ ID NO: 137466 - protein, 9 aa, Homo Sapiens
VAFKKTFSY

SEQ ID NO: 137467 - protein, 9 aa, Homo Sapiens
VAFKNAKQF

SEQ ID NO: 137468 - protein, 9 aa, Homo Sapiens
VAFPSSSVY

SEQ ID NO: 137469 - protein, 9 aa, Homo Sapiens
VAFPTEIKV

SEQ ID NO: 137470 - protein, 9 aa, Homo Sapiens
VAIAKVKLY

SEQ ID NO: 137471 - protein, 9 aa, Homo Sapiens
VAINHIVDF

SEQ ID NO: 137472 - protein, 9 aa, Homo Sapiens
VAIQSVRCY

SEQ ID NO: 137473 - protein, 9 aa, Homo Sapiens
VAIVKALYY

SEQ ID NO: 137474 - protein, 9 aa, Homo Sapiens
VAKAIATTV

SEQ ID NO: 137475 - protein, 9 aa, Homo Sapiens
VAKDYVRLM

SEQ ID NO: 137476 - protein, 9 aa, Homo Sapiens
VAKESIPLF

SEQ ID NO: 137477 - protein, 9 aa, Homo Sapiens
VAKLILVNF

SEQ ID NO: 137478 - protein, 9 aa, Homo Sapiens
VAKMGITEY

SEQ ID NO: 137479 - protein, 9 aa, Homo Sapiens
VAMGRVVKV

SEQ ID NO: 137480 - protein, 9 aa, Homo Sapiens
VAMKFAQVF

SEQ ID NO: 137481 - protein, 9 aa, Homo Sapiens
VANALAHRY

SEQ ID NO: 137482 - protein, 9 aa, Homo Sapiens
VANPNSAIF

SEQ ID NO: 137483 - protein, 9 aa, Homo Sapiens
VAPPGCSHL

SEQ ID NO: 137484 - protein, 9 aa, Homo Sapiens
VAQKKASFL

SEQ ID NO: 137485 - protein, 9 aa, Homo Sapiens
VARDLRAEF

SEQ ID NO: 137486 - protein, 9 aa, Homo Sapiens
VARLIAIFF

SEQ ID NO: 137487 - protein, 9 aa, Homo Sapiens
VARPDVVEM

SEQ ID NO: 137488 - protein, 9 aa, Homo Sapiens
VASAIYAKY

SEQ ID NO: 137489 - protein, 9 aa, Homo Sapiens
VASEGIKRY

SEQ ID NO: 137490 - protein, 9 aa, Homo Sapiens
VASSVNTEF

SEQ ID NO: 137491 - protein, 9 aa, Homo Sapiens
VATSRIIKY

SEQ ID NO: 137492 - protein, 9 aa, Homo Sapiens
VAVGRALYY

SEQ ID NO: 137493 - protein, 9 aa, Homo Sapiens
VAVHVFSEF

SEQ ID NO: 137494 - protein, 9 aa, Homo Sapiens
VAVHVVDFF

SEQ ID NO: 137495 - protein, 9 aa, Homo Sapiens
VAVNKPAEF

SEQ ID NO: 137496 - protein, 9 aa, Homo Sapiens
VAYDSKQYY

SEQ ID NO: 137497 - protein, 9 aa, Homo Sapiens
VAYGKGTYF

SEQ ID NO: 137498 - protein, 9 aa, Homo Sapiens
VAYPCAILY

SEQ ID NO: 137499 - protein, 9 aa, Homo Sapiens
VIHKIFSKF

SEQ ID NO: 137500 - protein, 9 aa, Homo Sapiens
VINGNIKTV

SEQ ID NO: 137501 - protein, 9 aa, Homo Sapiens
VIRELKEQY

SEQ ID NO: 137502 - protein, 9 aa, Homo Sapiens
VNWPESLTL

SEQ ID NO: 137503 - protein, 9 aa, Homo Sapiens
VQGPVGTDF

SEQ ID NO: 137504 - protein, 9 aa, Homo Sapiens
VQSDLLHKY

SEQ ID NO: 137505 - protein, 9 aa, Homo Sapiens
VRDTKTSHF

SEQ ID NO: 137506 - protein, 9 aa, Homo Sapiens
VSAGIQTSF

SEQ ID NO: 137507 - protein, 9 aa, Homo Sapiens
VTAAHIKKF

SEQ ID NO: 137508 - protein, 9 aa, Homo Sapiens
VTKDPGVGM

SEQ ID NO: 137509 - protein, 9 aa, Homo Sapiens
VTKPVGGNY

SEQ ID NO: 137510 - protein, 9 aa, Homo Sapiens
VTYNYPVHY

SEQ ID NO: 137511 - protein, 9 aa, Homo Sapiens
VTYVPVTTF

SEQ ID NO: 137512 - protein, 9 aa, Homo Sapiens
VVKMPSGEF

SEQ ID NO: 137513 - protein, 9 aa, Homo Sapiens
VVKPPGSSL

SEQ ID NO: 137514 - protein, 9 aa, Homo Sapiens
VVNGKVEYF

SEQ ID NO: 137515 - protein, 9 aa, Homo Sapiens
VVPQFVVFY

SEQ ID NO: 137516 - protein, 9 aa, Homo Sapiens
VVREMTEGY

SEQ ID NO: 137517 - protein, 9 aa, Homo Sapiens
VVYPWTQRF

SEQ ID NO: 137518 - protein, 9 aa, Homo Sapiens
WAHAQVKRY

SEQ ID NO: 137519 - protein, 9 aa, Homo Sapiens
WARPLSVSF

SEQ ID NO: 137520 - protein, 9 aa, Homo Sapiens
WAYARTINV

SEQ ID NO: 137521 - protein, 9 aa, Homo Sapiens
WAYPRQVFI

SEQ ID NO: 137522 - protein, 9 aa, Homo Sapiens
YAAAQLRQY

SEQ ID NO: 137523 - protein, 9 aa, Homo Sapiens
YAAASHSYY

SEQ ID NO: 137524 - protein, 9 aa, Homo Sapiens
YAAELIERV

SEQ ID NO: 137525 - protein, 9 aa, Homo Sapiens
YAAGVHSVL

SEQ ID NO: 137526 - protein, 9 aa, Homo Sapiens
YAALHGEFY

SEQ ID NO: 137527 - protein, 9 aa, Homo Sapiens
YAANPGQLF

SEQ ID NO: 137528 - protein, 9 aa, Homo Sapiens
YAAPYKSDF

SEQ ID NO: 137529 - protein, 9 aa, Homo Sapiens
YAAQQAASY

SEQ ID NO: 137530 - protein, 9 aa, Homo Sapiens
YACSILYKT

SEQ ID NO: 137531 - protein, 9 aa, Homo Sapiens
YAFAHILTV

SEQ ID NO: 137532 - protein, 9 aa, Homo Sapiens
YAFDFARQS

SEQ ID NO: 137533 - protein, 9 aa, Homo Sapiens
YAFGGGCEL

SEQ ID NO: 137534 - protein, 9 aa, Homo Sapiens
YAFGSCINH

SEQ ID NO: 137535 - protein, 9 aa, Homo Sapiens
YAFNGTQRF

SEQ ID NO: 137536 - protein, 9 aa, Homo Sapiens
YAFNHSADF

SEQ ID NO: 137537 - protein, 9 aa, Homo Sapiens
YAFNMKATV

SEQ ID NO: 137538 - protein, 9 aa, Homo Sapiens
YAFPKAVSV

SEQ ID NO: 137539 - protein, 9 aa, Homo Sapiens
YAFPKAVTV

SEQ ID NO: 137540 - protein, 9 aa, Homo Sapiens
YAFPKEFPY

SEQ ID NO: 137541 - protein, 9 aa, Homo Sapiens
YAFPKSITV

SEQ ID NO: 137542 - protein, 9 aa, Homo Sapiens
YAFQPKCTY

SEQ ID NO: 137543 - protein, 9 aa, Homo Sapiens
YAFSGVEEL

SEQ ID NO: 137544 - protein, 9 aa, Homo Sapiens
YAFSLDSKY

SEQ ID NO: 137545 - protein, 9 aa, Homo Sapiens
YAFVRPVIL

SEQ ID NO: 137546 - protein, 9 aa, Homo Sapiens
YAHFPINVV

SEQ ID NO: 137547 - protein, 9 aa, Homo Sapiens
YAIDNPLHY

SEQ ID NO: 137548 - protein, 9 aa, Homo Sapiens
YAIEKIERI

SEQ ID NO: 137549 - protein, 9 aa, Homo Sapiens
YAIGLVMRL

SEQ ID NO: 137550 - protein, 9 aa, Homo Sapiens
YAIHGVLEV

SEQ ID NO: 137551 - protein, 9 aa, Homo Sapiens
YAIKNIHGV

SEQ ID NO: 137552 - protein, 9 aa, Homo Sapiens
YAISKPEVL

SEQ ID NO: 137553 - protein, 9 aa, Homo Sapiens
YAITRVLRL

SEQ ID NO: 137554 - protein, 9 aa, Homo Sapiens
YAKDDPLEF

SEQ ID NO: 137555 - protein, 9 aa, Homo Sapiens
YAKDGRVSY

SEQ ID NO: 137556 - protein, 9 aa, Homo Sapiens
YAKDKTCFY

SEQ ID NO: 137557 - protein, 9 aa, Homo Sapiens
YAKEKLESF

SEQ ID NO: 137558 - protein, 9 aa, Homo Sapiens
YAKIVEIPF

SEQ ID NO: 137559 - protein, 9 aa, Homo Sapiens
YAKNNIPII

SEQ ID NO: 137560 - protein, 9 aa, Homo Sapiens
YAKQYEEFY

SEQ ID NO: 137561 - protein, 9 aa, Homo Sapiens
YAKRPGIGL

SEQ ID NO: 137562 - protein, 9 aa, Homo Sapiens
YALNHTLSV

SEQ ID NO: 137563 - protein, 9 aa, Homo Sapiens
YAMKLLSKF

SEQ ID NO: 137564 - protein, 9 aa, Homo Sapiens
YAMTRAQRV

SEQ ID NO: 137565 - protein, 9 aa, Homo Sapiens
YANAKGIGY

SEQ ID NO: 137566 - protein, 9 aa, Homo Sapiens
YANAKIYKL

SEQ ID NO: 137567 - protein, 9 aa, Homo Sapiens
YANEVGEAF

SEQ ID NO: 137568 - protein, 9 aa, Homo Sapiens
YANSKAVTL

SEQ ID NO: 137569 - protein, 9 aa, Homo Sapiens
YANYYTREV

SEQ ID NO: 137570 - protein, 9 aa, Homo Sapiens
YARDETEFY

SEQ ID NO: 137571 - protein, 9 aa, Homo Sapiens
YARNDTVRF

SEQ ID NO: 137572 - protein, 9 aa, Homo Sapiens
YARTDGKVF

SEQ ID NO: 137573 - protein, 9 aa, Homo Sapiens
YARVVGSEY

SEQ ID NO: 137574 - protein, 9 aa, Homo Sapiens
YASDCASFF

SEQ ID NO: 137575 - protein, 9 aa, Homo Sapiens
YASENVNKL

SEQ ID NO: 137576 - protein, 9 aa, Homo Sapiens
YASGAAAYY

SEQ ID NO: 137577 - protein, 9 aa, Homo Sapiens
YASGKISQF

SEQ ID NO: 137578 - protein, 9 aa, Homo Sapiens
YASNITSVL

SEQ ID NO: 137579 - protein, 9 aa, Homo Sapiens
YASSKLLKI

SEQ ID NO: 137580 - protein, 9 aa, Homo Sapiens
YASSPGGVY

SEQ ID NO: 137581 - protein, 9 aa, Homo Sapiens
YATFIVTNY

SEQ ID NO: 137582 - protein, 9 aa, Homo Sapiens
YATIILSKM

SEQ ID NO: 137583 - protein, 9 aa, Homo Sapiens
YAVDRAITH

SEQ ID NO: 137584 - protein, 9 aa, Homo Sapiens
YAVGDVEKM

SEQ ID NO: 137585 - protein, 9 aa, Homo Sapiens
YAVSELAGH

SEQ ID NO: 137586 - protein, 9 aa, Homo Sapiens
YAYEKPHVV

SEQ ID NO: 137587 - protein, 9 aa, Homo Sapiens
YAYPYSYYY

SEQ ID NO: 137588 - protein, 9 aa, Homo Sapiens
YAYRDAVFL

SEQ ID NO: 137589 - protein, 9 aa, Homo Sapiens
YGMERVWCV

SEQ ID NO: 137590 - protein, 9 aa, Homo Sapiens
YGNGQVHLY

SEQ ID NO: 137591 - protein, 9 aa, Homo Sapiens
YGYDNVKEY

SEQ ID NO: 137592 - protein, 9 aa, Homo Sapiens
YGYEHILTL

SEQ ID NO: 137593 - protein, 9 aa, Homo Sapiens
YGYGHESEL

SEQ ID NO: 137594 - protein, 9 aa, Homo Sapiens
YGYSKLIEL

SEQ ID NO: 137595 - protein, 9 aa, Homo Sapiens
YIAPLFDKF

SEQ ID NO: 137596 - protein, 9 aa, Homo Sapiens
YIISGLTGF

SEQ ID NO: 137597 - protein, 9 aa, Homo Sapiens
YIKEYVTCH

SEQ ID NO: 137598 - protein, 9 aa, Homo Sapiens
YIRDLALEY

SEQ ID NO: 137599 - protein, 9 aa, Homo Sapiens
YIRGSTIKY

SEQ ID NO: 137600 - protein, 9 aa, Homo Sapiens
YIRPNIAQK

SEQ ID NO: 137601 - protein, 9 aa, Homo Sapiens
YIVKWPLSL

SEQ ID NO: 137602 - protein, 9 aa, Homo Sapiens
YIYPKHLKY

SEQ ID NO: 137603 - protein, 9 aa, Homo Sapiens
YLADIFTKL

SEQ ID NO: 137604 - protein, 9 aa, Homo Sapiens
YLADLYHFV

SEQ ID NO: 137605 - protein, 9 aa, Homo Sapiens
YLKDLIEEV

SEQ ID NO: 137606 - protein, 9 aa, Homo Sapiens
YLRELLTTM

SEQ ID NO: 137607 - protein, 9 aa, Homo Sapiens
YLSPKLWAL

SEQ ID NO: 137608 - protein, 9 aa, Homo Sapiens
YLYPDQTHF

SEQ ID NO: 137609 - protein, 9 aa, Homo Sapiens
YQADIERMY

SEQ ID NO: 137610 - protein, 9 aa, Homo Sapiens
YQASYNQSF

SEQ ID NO: 137611 - protein, 9 aa, Homo Sapiens
YQFTGIKKY

SEQ ID NO: 137612 - protein, 9 aa, Homo Sapiens
YQHGGVTGL

SEQ ID NO: 137613 - protein, 9 aa, Homo Sapiens
YQVGINQRF

SEQ ID NO: 137614 - protein, 9 aa, Homo Sapiens
YQYGAVVTL

SEQ ID NO: 137615 - protein, 9 aa, Homo Sapiens
YQYPRPLLI

SEQ ID NO: 137616 - protein, 9 aa, Homo Sapiens
YQYPVIIHL

SEQ ID NO: 137617 - protein, 9 aa, Homo Sapiens
YSFDYPSDM

SEQ ID NO: 137618 - protein, 9 aa, Homo Sapiens
YSFGGCHRY

SEQ ID NO: 137619 - protein, 9 aa, Homo Sapiens
YSGPSREFF

SEQ ID NO: 137620 - protein, 9 aa, Homo Sapiens
YSIDKAKKF

SEQ ID NO: 137621 - protein, 9 aa, Homo Sapiens
YSKPRLATF

SEQ ID NO: 137622 - protein, 9 aa, Homo Sapiens
YSMPSTHAM

SEQ ID NO: 137623 - protein, 9 aa, Homo Sapiens
YSNGFCTVY

SEQ ID NO: 137624 - protein, 9 aa, Homo Sapiens
YSSENISNF

SEQ ID NO: 137625 - protein, 9 aa, Homo Sapiens
YSSPYPQEY

SEQ ID NO: 137626 - protein, 9 aa, Homo Sapiens
YSVDRLYEL

SEQ ID NO: 137627 - protein, 9 aa, Homo Sapiens
YSYFSPRTM

SEQ ID NO: 137628 - protein, 9 aa, Homo Sapiens
YSYPELVKM

SEQ ID NO: 137629 - protein, 9 aa, Homo Sapiens
YTAQPTQGY

SEQ ID NO: 137630 - protein, 9 aa, Homo Sapiens
YTCPFVEKF

SEQ ID NO: 137631 - protein, 9 aa, Homo Sapiens
YTFGRIVIY

SEQ ID NO: 137632 - protein, 9 aa, Homo Sapiens
YTIPPGHQV

SEQ ID NO: 137633 - protein, 9 aa, Homo Sapiens
YTKAWEEYY

SEQ ID NO: 137634 - protein, 9 aa, Homo Sapiens
YTNGKCVIL

SEQ ID NO: 137635 - protein, 9 aa, Homo Sapiens
YTNKYSSQF

SEQ ID NO: 137636 - protein, 9 aa, Homo Sapiens
YTRPGLPTF

SEQ ID NO: 137637 - protein, 9 aa, Homo Sapiens
YTSGTFRTV

SEQ ID NO: 137638 - protein, 9 aa, Homo Sapiens
YTTDRVMTV

SEQ ID NO: 137639 - protein, 9 aa, Homo Sapiens
YTYRGPKAF

SEQ ID NO: 137640 - protein, 9 aa, Homo Sapiens
YVAEILPKY

SEQ ID NO: 137641 - protein, 9 aa, Homo Sapiens
YVFPGVTRL

SEQ ID NO: 137642 - protein, 9 aa, Homo Sapiens
YVHALVAYF

SEQ ID NO: 137643 - protein, 9 aa, Homo Sapiens
YVIPKTGFY

SEQ ID NO: 137644 - protein, 9 aa, Homo Sapiens
YVIQKFFEF

SEQ ID NO: 137645 - protein, 9 aa, Homo Sapiens
YVKDRVEKV

SEQ ID NO: 137646 - protein, 9 aa, Homo Sapiens
YVKSIVQEY

SEQ ID NO: 137647 - protein, 9 aa, Homo Sapiens
YVSDIQELY

SEQ ID NO: 137648 - protein, 9 aa, Homo Sapiens
YVTTSTRTY

SEQ ID NO: 137649 - protein, 9 aa, Homo Sapiens
YVYPKYLKY

SEQ ID NO: 137650 - protein, 9 aa, Homo Sapiens
YVYPLQLKY

SEQ ID NO: 137651 - protein, 10 aa, Homo Sapiens
AAAAAAAAAY

SEQ ID NO: 137652 - protein, 10 aa, Homo Sapiens
AAAAAAAAQY

SEQ ID NO: 137653 - protein, 10 aa, Homo Sapiens
AAAAAAAATM

SEQ ID NO: 137654 - protein, 10 aa, Homo Sapiens
AAAAAAALLY

SEQ ID NO: 137655 - protein, 10 aa, Homo Sapiens
AAAAAAATMA

SEQ ID NO: 137656 - protein, 10 aa, Homo Sapiens
AAAAAAQSVY

SEQ ID NO: 137657 - protein, 10 aa, Homo Sapiens
AAFGGNPKSV

SEQ ID NO: 137658 - protein, 10 aa, Homo Sapiens
AAFPGASLYL

SEQ ID NO: 137659 - protein, 10 aa, Homo Sapiens
AIAQFPYVEF

SEQ ID NO: 137660 - protein, 10 aa, Homo Sapiens
ATPVFNPTVF

SEQ ID NO: 137661 - protein, 10 aa, Homo Sapiens
FADPHGKRVF

SEQ ID NO: 137662 - protein, 10 aa, Homo Sapiens
FADPHSKRVF

SEQ ID NO: 137663 - protein, 10 aa, Homo Sapiens
FAFADAPNHY

SEQ ID NO: 137664 - protein, 10 aa, Homo Sapiens
FAHQGNPAVY

SEQ ID NO: 137665 - protein, 10 aa, Homo Sapiens
FAIDLNGKKY

SEQ ID NO: 137666 - protein, 10 aa, Homo Sapiens
FAIGGIARTY

SEQ ID NO: 137667 - protein, 10 aa, Homo Sapiens
FAIGGSGSSY

SEQ ID NO: 137668 - protein, 10 aa, Homo Sapiens
FAIGSQVSEH

SEQ ID NO: 137669 - protein, 10 aa, Homo Sapiens
FAKGPTLTVY

SEQ ID NO: 137670 - protein, 10 aa, Homo Sapiens
FAKPRNQGGY

SEQ ID NO: 137671 - protein, 10 aa, Homo Sapiens
FAPNFKESEM

SEQ ID NO: 137672 - protein, 10 aa, Homo Sapiens
FAWEPNGSKF

SEQ ID NO: 137673 - protein, 10 aa, Homo Sapiens
FAYGGHPYPF

SEQ ID NO: 137674 - protein, 10 aa, Homo Sapiens
FAYPNRPDVL

SEQ ID NO: 137675 - protein, 10 aa, Homo Sapiens
FAYSDSRVGF

SEQ ID NO: 137676 - protein, 10 aa, Homo Sapiens
FIIDTRDAGY

SEQ ID NO: 137677 - protein, 10 aa, Homo Sapiens
FIPSSVPATF

SEQ ID NO: 137678 - protein, 10 aa, Homo Sapiens
FLFDGSPTYV

SEQ ID NO: 137679 - protein, 10 aa, Homo Sapiens
FQASLTGRLL

SEQ ID NO: 137680 - protein, 10 aa, Homo Sapiens
FQPPFQPGRM

SEQ ID NO: 137681 - protein, 10 aa, Homo Sapiens
FSFGGKLVTF

SEQ ID NO: 137682 - protein, 10 aa, Homo Sapiens
FTNQGTVIHF

SEQ ID NO: 137683 - protein, 10 aa, Homo Sapiens
FTPFVDPRVY

SEQ ID NO: 137684 - protein, 10 aa, Homo Sapiens
FVHWYVGEGM

SEQ ID NO: 137685 - protein, 10 aa, Homo Sapiens
FVRAQELHTF

SEQ ID NO: 137686 - protein, 10 aa, Homo Sapiens
GAIGGTPPAF

SEQ ID NO: 137687 - protein, 10 aa, Homo Sapiens
GIPTHHPRVY

SEQ ID NO: 137688 - protein, 10 aa, Homo Sapiens
HVPNFIFDEF

SEQ ID NO: 137689 - protein, 10 aa, Homo Sapiens
IAKSGTKAFM

SEQ ID NO: 137690 - protein, 10 aa, Homo Sapiens
IALSLASFRG

SEQ ID NO: 137691 - protein, 10 aa, Homo Sapiens
ISHDTFGTTY

SEQ ID NO: 137692 - protein, 10 aa, Homo Sapiens
IVKKPGNIYY

SEQ ID NO: 137693 - protein, 10 aa, Homo Sapiens
KAFDTAGNGY

SEQ ID NO: 137694 - protein, 10 aa, Homo Sapiens
KAFISNLNEM

SEQ ID NO: 137695 - protein, 10 aa, Homo Sapiens
KLFPGSPAIY

SEQ ID NO: 137696 - protein, 10 aa, Homo Sapiens
KLPEFTKSEY

SEQ ID NO: 137697 - protein, 10 aa, Homo Sapiens
KLPNFGFVVF

SEQ ID NO: 137698 - protein, 10 aa, Homo Sapiens
KVAEAAIQIF

SEQ ID NO: 137699 - protein, 10 aa, Homo Sapiens
LAAADISAYY

SEQ ID NO: 137700 - protein, 10 aa, Homo Sapiens
LAADFEIGHF

SEQ ID NO: 137701 - protein, 10 aa, Homo Sapiens
LALAPAGFSY

SEQ ID NO: 137702 - protein, 10 aa, Homo Sapiens
LARDLKAVKY

SEQ ID NO: 137703 - protein, 10 aa, Homo Sapiens
LAYGAQAASY

SEQ ID NO: 137704 - protein, 10 aa, Homo Sapiens
MAYGASFLSF

SEQ ID NO: 137705 - protein, 10 aa, Homo Sapiens
RAATPTLTTF

SEQ ID NO: 137706 - protein, 10 aa, Homo Sapiens
RALPFVPMSY

SEQ ID NO: 137707 - protein, 10 aa, Homo Sapiens
RAYPHNLMTF

SEQ ID NO: 137708 - protein, 10 aa, Homo Sapiens
RIPEFNMAAF

SEQ ID NO: 137709 - protein, 10 aa, Homo Sapiens
RNFDTGLQEY

SEQ ID NO: 137710 - protein, 10 aa, Homo Sapiens
RTVDWALAEY

SEQ ID NO: 137711 - protein, 10 aa, Homo Sapiens
SAAAPAGTTF

SEQ ID NO: 137712 - protein, 10 aa, Homo Sapiens
SAANPRGVFM

SEQ ID NO: 137713 - protein, 10 aa, Homo Sapiens
SACGRTVSLF

SEQ ID NO: 137714 - protein, 10 aa, Homo Sapiens
SACRTSGQTF

SEQ ID NO: 137715 - protein, 10 aa, Homo Sapiens
SAKPPESEGF

SEQ ID NO: 137716 - protein, 10 aa, Homo Sapiens
SIKDPKDLKF

SEQ ID NO: 137717 - protein, 10 aa, Homo Sapiens
SLLGKLLGTV

SEQ ID NO: 137718 - protein, 10 aa, Homo Sapiens
SLPNFKQNEF

SEQ ID NO: 137719 - protein, 10 aa, Homo Sapiens
TAKRPSDIKF

SEQ ID NO: 137720 - protein, 10 aa, Homo Sapiens
VAAMPRPVSY

SEQ ID NO: 137721 - protein, 10 aa, Homo Sapiens
VAAPPPKNSF

SEQ ID NO: 137722 - protein, 10 aa, Homo Sapiens
VAFTPDGNHF

SEQ ID NO: 137723 - protein, 10 aa, Homo Sapiens
VAKEARNVTM

SEQ ID NO: 137724 - protein, 10 aa, Homo Sapiens
VAMNPTNTVF

SEQ ID NO: 137725 - protein, 10 aa, Homo Sapiens
VLPHQPLATY

SEQ ID NO: 137726 - protein, 10 aa, Homo Sapiens
VLSAADKGNV

SEQ ID NO: 137727 - protein, 10 aa, Homo Sapiens
YAADIFYSRY

SEQ ID NO: 137728 - protein, 10 aa, Homo Sapiens
YAAPHPLQSY

SEQ ID NO: 137729 - protein, 10 aa, Homo Sapiens
YAFGRVFSGL

SEQ ID NO: 137730 - protein, 10 aa, Homo Sapiens
YAFPKAVSVF

SEQ ID NO: 137731 - protein, 10 aa, Homo Sapiens
YAFPKSITVF

SEQ ID NO: 137732 - protein, 10 aa, Homo Sapiens
YALDPLHPVM

SEQ ID NO: 137733 - protein, 10 aa, Homo Sapiens
YANDFASEYY

SEQ ID NO: 137734 - protein, 10 aa, Homo Sapiens
YATTVIPRVY

SEQ ID NO: 137735 - protein, 10 aa, Homo Sapiens
YGYNNDNQEF

SEQ ID NO: 137736 - protein, 10 aa, Homo Sapiens
YINPAKLTPY

SEQ ID NO: 137737 - protein, 10 aa, Homo Sapiens
YIPEHSPEYY

SEQ ID NO: 137738 - protein, 10 aa, Homo Sapiens
YLAPFSLSNY

SEQ ID NO: 137739 - protein, 10 aa, Homo Sapiens
YLKRPGLTYL

SEQ ID NO: 137740 - protein, 10 aa, Homo Sapiens
YLPDFRFTPF

SEQ ID NO: 137741 - protein, 10 aa, Homo Sapiens
YMIDPSGVSY

SEQ ID NO: 137742 - protein, 10 aa, Homo Sapiens
YQFTGIKKYF

SEQ ID NO: 137743 - protein, 10 aa, Homo Sapiens
YQRDGYQQNF

SEQ ID NO: 137744 - protein, 10 aa, Homo Sapiens
YSYSREYNEY

SEQ ID NO: 137745 - protein, 10 aa, Homo Sapiens
YTNGSFGSNF

SEQ ID NO: 137746 - protein, 10 aa, Homo Sapiens
YVIEPHSMEF

SEQ ID NO: 137747 - protein, 10 aa, Homo Sapiens
YVIPHPVHAF

SEQ ID NO: 137748 - protein, 10 aa, Homo Sapiens
YVNPANTHQF

SEQ ID NO: 137749 - protein, 11 aa, Homo Sapiens
AAAAAAAAATY

SEQ ID NO: 137750 - protein, 11 aa, Homo Sapiens
AAAAAAAALLY

SEQ ID NO: 137751 - protein, 11 aa, Homo Sapiens
AAAAAAATARY

SEQ ID NO: 137752 - protein, 11 aa, Homo Sapiens
AAAQAASQHVF

SEQ ID NO: 137753 - protein, 11 aa, Homo Sapiens
AAFQPNQYQML

SEQ ID NO: 137754 - protein, 11 aa, Homo Sapiens
AAINPELLQLL

SEQ ID NO: 137755 - protein, 11 aa, Homo Sapiens
AAKDPANGRQF

SEQ ID NO: 137756 - protein, 11 aa, Homo Sapiens
AFLEQMSKAFL

SEQ ID NO: 137757 - protein, 11 aa, Homo Sapiens
AVRDISEASVF

SEQ ID NO: 137758 - protein, 11 aa, Homo Sapiens
EVVEEAENGRD

SEQ ID NO: 137759 - protein, 11 aa, Homo Sapiens
FAALVASKVFY

SEQ ID NO: 137760 - protein, 11 aa, Homo Sapiens
FAKPVYPGQTL

SEQ ID NO: 137761 - protein, 11 aa, Homo Sapiens
FAKSVSFSDVF

SEQ ID NO: 137762 - protein, 11 aa, Homo Sapiens
FAVDPEKIQLY

SEQ ID NO: 137763 - protein, 11 aa, Homo Sapiens
FAYDGKDYLTL

SEQ ID NO: 137764 - protein, 11 aa, Homo Sapiens
FSKYPASSSVF

SEQ ID NO: 137765 - protein, 11 aa, Homo Sapiens
FVYDVTKMTSF

SEQ ID NO: 137766 - protein, 11 aa, Homo Sapiens
GIHETTFNSIM

SEQ ID NO: 137767 - protein, 11 aa, Homo Sapiens
HATVATQTQFF

SEQ ID NO: 137768 - protein, 11 aa, Homo Sapiens
HTSDVPGKLIY

SEQ ID NO: 137769 - protein, 11 aa, Homo Sapiens
KAAEAAASAYY

SEQ ID NO: 137770 - protein, 11 aa, Homo Sapiens
LAAAAAASYQV

SEQ ID NO: 137771 - protein, 11 aa, Homo Sapiens
LAAALPDLCGG

SEQ ID NO: 137772 - protein, 11 aa, Homo Sapiens
LAKDPKLQQGY

SEQ ID NO: 137773 - protein, 11 aa, Homo Sapiens
LALDPSLVPTF

SEQ ID NO: 137774 - protein, 11 aa, Homo Sapiens
LSRDPETLVGY

SEQ ID NO: 137775 - protein, 11 aa, Homo Sapiens
RAAAAAAAATM

SEQ ID NO: 137776 - protein, 11 aa, Homo Sapiens
RIMDPDVITGY

SEQ ID NO: 137777 - protein, 11 aa, Homo Sapiens
SAAAAAAAAAY

SEQ ID NO: 137778 - protein, 11 aa, Homo Sapiens
SAAAPRQPGLM

SEQ ID NO: 137779 - protein, 11 aa, Homo Sapiens
SAVNPEHLSYF

SEQ ID NO: 137780 - protein, 11 aa, Homo Sapiens
SAYGEVGRVFF

SEQ ID NO: 137781 - protein, 11 aa, Homo Sapiens
SIKDVLDSEGY

SEQ ID NO: 137782 - protein, 11 aa, Homo Sapiens
SSAKVANASYY

SEQ ID NO: 137783 - protein, 11 aa, Homo Sapiens
SSINPDHLSYF

SEQ ID NO: 137784 - protein, 11 aa, Homo Sapiens
SSINPDHLTYF

SEQ ID NO: 137785 - protein, 11 aa, Homo Sapiens
STINPDHLSYF

SEQ ID NO: 137786 - protein, 11 aa, Homo Sapiens
SVIDSAELQAY

SEQ ID NO: 137787 - protein, 11 aa, Homo Sapiens
SVNSHAATTQY

SEQ ID NO: 137788 - protein, 11 aa, Homo Sapiens
TTIDPRWLVEF

SEQ ID NO: 137789 - protein, 11 aa, Homo Sapiens
VAIQPDVFSHY

SEQ ID NO: 137790 - protein, 11 aa, Homo Sapiens
VAMSPELIQQF

SEQ ID NO: 137791 - protein, 11 aa, Homo Sapiens
VANPNSAIFGG

SEQ ID NO: 137792 - protein, 11 aa, Homo Sapiens
VAQNPANMSKY

SEQ ID NO: 137793 - protein, 11 aa, Homo Sapiens
VAYPHDGKIFF

SEQ ID NO: 137794 - protein, 11 aa, Homo Sapiens
YAISPGLDITF

SEQ ID NO: 137795 - protein, 11 aa, Homo Sapiens
YAKSSVGETVY

SEQ ID NO: 137796 - protein, 11 aa, Homo Sapiens
YAQDPSTGCYM

SEQ ID NO: 137797 - protein, 11 aa, Homo Sapiens
YARYSGSYNDY

SEQ ID NO: 137798 - protein, 11 aa, Homo Sapiens
YASGRTTGIVM

SEQ ID NO: 137799 - protein, 11 aa, Homo Sapiens
YAWESSAGGSF

SEQ ID NO: 137800 - protein, 11 aa, Homo Sapiens
YIAGHPAFVNY

SEQ ID NO: 137801 - protein, 11 aa, Homo Sapiens
YLFEPHSGEEY

SEQ ID NO: 137802 - protein, 11 aa, Homo Sapiens
YQIDITTENQY

SEQ ID NO: 137803 - protein, 8 aa, Homo Sapiens
AAAQLPSL

SEQ ID NO: 137804 - protein, 8 aa, Homo Sapiens
AAAVLFRM

SEQ ID NO: 137805 - protein, 8 aa, Homo Sapiens
AAGPGFSL

SEQ ID NO: 137806 - protein, 8 aa, Homo Sapiens
AAGVVLEM

SEQ ID NO: 137807 - protein, 8 aa, Homo Sapiens
AAHEFTVY

SEQ ID NO: 137808 - protein, 8 aa, Homo Sapiens
AAIELPSL

SEQ ID NO: 137809 - protein, 8 aa, Homo Sapiens
AASVRPVL

SEQ ID NO: 137810 - protein, 8 aa, Homo Sapiens
AATIILRE

SEQ ID NO: 137811 - protein, 8 aa, Homo Sapiens
AATILREL

SEQ ID NO: 137812 - protein, 8 aa, Homo Sapiens
AFAEALLL

SEQ ID NO: 137813 - protein, 8 aa, Homo Sapiens
AGGKILTF

SEQ ID NO: 137814 - protein, 8 aa, Homo Sapiens
ALKEEIAL

SEQ ID NO: 137815 - protein, 8 aa, Homo Sapiens
AMGPILEF

SEQ ID NO: 137816 - protein, 8 aa, Homo Sapiens
ASIPRPSI

SEQ ID NO: 137817 - protein, 8 aa, Homo Sapiens
ASYLLAAL

SEQ ID NO: 137818 - protein, 8 aa, Homo Sapiens
ASYVHYVF

SEQ ID NO: 137819 - protein, 8 aa, Homo Sapiens
FAAEAIAM

SEQ ID NO: 137820 - protein, 8 aa, Homo Sapiens
FAAEILHR

SEQ ID NO: 137821 - protein, 8 aa, Homo Sapiens
FAAFLTEL

SEQ ID NO: 137822 - protein, 8 aa, Homo Sapiens
FAALLHEY

SEQ ID NO: 137823 - protein, 8 aa, Homo Sapiens
FAASLARL

SEQ ID NO: 137824 - protein, 8 aa, Homo Sapiens
FAASLLAM

SEQ ID NO: 137825 - protein, 8 aa, Homo Sapiens
FAAVIQAL

SEQ ID NO: 137826 - protein, 8 aa, Homo Sapiens
FAEHRPIL

SEQ ID NO: 137827 - protein, 8 aa, Homo Sapiens
FAELLRAL

SEQ ID NO: 137828 - protein, 8 aa, Homo Sapiens
FAFHLRVL

SEQ ID NO: 137829 - protein, 8 aa, Homo Sapiens
FAFNIMEI

SEQ ID NO: 137830 - protein, 8 aa, Homo Sapiens
FAFSLSVM

SEQ ID NO: 137831 - protein, 8 aa, Homo Sapiens
FAFVHISF

SEQ ID NO: 137832 - protein, 8 aa, Homo Sapiens
FAFVLLDT

SEQ ID NO: 137833 - protein, 8 aa, Homo Sapiens
FAGSFLEY

SEQ ID NO: 137834 - protein, 8 aa, Homo Sapiens
FAHGLGEL

SEQ ID NO: 137835 - protein, 8 aa, Homo Sapiens
FAHILTVL

SEQ ID NO: 137836 - protein, 8 aa, Homo Sapiens
FAHSFIEL

SEQ ID NO: 137837 - protein, 8 aa, Homo Sapiens
FAIILKSM

SEQ ID NO: 137838 - protein, 8 aa, Homo Sapiens
FAISTGSL

SEQ ID NO: 137839 - protein, 8 aa, Homo Sapiens
FAKSLAML

SEQ ID NO: 137840 - protein, 8 aa, Homo Sapiens
FALAHAAF

SEQ ID NO: 137841 - protein, 8 aa, Homo Sapiens
FALEHLEM

SEQ ID NO: 137842 - protein, 8 aa, Homo Sapiens
FALLLPVY

SEQ ID NO: 137843 - protein, 8 aa, Homo Sapiens
FALNHPEL

SEQ ID NO: 137844 - protein, 8 aa, Homo Sapiens
FALVLSSM

SEQ ID NO: 137845 - protein, 8 aa, Homo Sapiens
FASDPILY

SEQ ID NO: 137846 - protein, 8 aa, Homo Sapiens
FASVFEKY

SEQ ID NO: 137847 - protein, 8 aa, Homo Sapiens
FATVVEEL

SEQ ID NO: 137848 - protein, 8 aa, Homo Sapiens
FAVALPQL

SEQ ID NO: 137849 - protein, 8 aa, Homo Sapiens
FAVTLETV

SEQ ID NO: 137850 - protein, 8 aa, Homo Sapiens
FAWGHDEL

SEQ ID NO: 137851 - protein, 8 aa, Homo Sapiens
FFRLFPEY

SEQ ID NO: 137852 - protein, 8 aa, Homo Sapiens
FGFDLPAV

SEQ ID NO: 137853 - protein, 8 aa, Homo Sapiens
FGGEPLSY

SEQ ID NO: 137854 - protein, 8 aa, Homo Sapiens
FGHEFLEF

SEQ ID NO: 137855 - protein, 8 aa, Homo Sapiens
FGILLTEI

SEQ ID NO: 137856 - protein, 8 aa, Homo Sapiens
FGIVLYEL

SEQ ID NO: 137857 - protein, 8 aa, Homo Sapiens
FGLVLQTL

SEQ ID NO: 137858 - protein, 8 aa, Homo Sapiens
FGTVLTEH

SEQ ID NO: 137859 - protein, 8 aa, Homo Sapiens
FGVLLMEV

SEQ ID NO: 137860 - protein, 8 aa, Homo Sapiens
FGVLLYEM

SEQ ID NO: 137861 - protein, 8 aa, Homo Sapiens
FGVTLHEL

SEQ ID NO: 137862 - protein, 8 aa, Homo Sapiens
FGVTLYEL

SEQ ID NO: 137863 - protein, 8 aa, Homo Sapiens
FGVVLDEI

SEQ ID NO: 137864 - protein, 8 aa, Homo Sapiens
FGYVLPII

SEQ ID NO: 137865 - protein, 8 aa, Homo Sapiens
FIAKLLEL

SEQ ID NO: 137866 - protein, 8 aa, Homo Sapiens
FIFQQPEA

SEQ ID NO: 137867 - protein, 8 aa, Homo Sapiens
FIGEKAVL

SEQ ID NO: 137868 - protein, 8 aa, Homo Sapiens
FIGPALLF

SEQ ID NO: 137869 - protein, 8 aa, Homo Sapiens
FIGYPITL

SEQ ID NO: 137870 - protein, 8 aa, Homo Sapiens
FIHEFISF

SEQ ID NO: 137871 - protein, 8 aa, Homo Sapiens
FIIILNHM

SEQ ID NO: 137872 - protein, 8 aa, Homo Sapiens
FIIKKPEM

SEQ ID NO: 137873 - protein, 8 aa, Homo Sapiens
FILLLREV

SEQ ID NO: 137874 - protein, 8 aa, Homo Sapiens
FIQLLPVL

SEQ ID NO: 137875 - protein, 8 aa, Homo Sapiens
FIWLHDSF

SEQ ID NO: 137876 - protein, 8 aa, Homo Sapiens
FIYEFEHF

SEQ ID NO: 137877 - protein, 8 aa, Homo Sapiens
FLHILPAH

SEQ ID NO: 137878 - protein, 8 aa, Homo Sapiens
FLHVLSEL

SEQ ID NO: 137879 - protein, 8 aa, Homo Sapiens
FLQQPRPL

SEQ ID NO: 137880 - protein, 8 aa, Homo Sapiens
FQVLLAEL

SEQ ID NO: 137881 - protein, 8 aa, Homo Sapiens
FSATLPKL

SEQ ID NO: 137882 - protein, 8 aa, Homo Sapiens
FSFQRPLL

SEQ ID NO: 137883 - protein, 8 aa, Homo Sapiens
FSFRHLEL

SEQ ID NO: 137884 - protein, 8 aa, Homo Sapiens
FSFVMPSL

SEQ ID NO: 137885 - protein, 8 aa, Homo Sapiens
FSGPAITL

SEQ ID NO: 137886 - protein, 8 aa, Homo Sapiens
FSHLLEIL

SEQ ID NO: 137887 - protein, 8 aa, Homo Sapiens
FSHLQPTL

SEQ ID NO: 137888 - protein, 8 aa, Homo Sapiens
FSHQLLEL

SEQ ID NO: 137889 - protein, 8 aa, Homo Sapiens
FSIFLQEM

SEQ ID NO: 137890 - protein, 8 aa, Homo Sapiens
FSKIRPQL

SEQ ID NO: 137891 - protein, 8 aa, Homo Sapiens
FSPVGSVL

SEQ ID NO: 137892 - protein, 8 aa, Homo Sapiens
FSQIQPKL

SEQ ID NO: 137893 - protein, 8 aa, Homo Sapiens
FSQLLHQI

SEQ ID NO: 137894 - protein, 8 aa, Homo Sapiens
FSQSLQEL

SEQ ID NO: 137895 - protein, 8 aa, Homo Sapiens
FSRVALEF

SEQ ID NO: 137896 - protein, 8 aa, Homo Sapiens
FSSQIFSL

SEQ ID NO: 137897 - protein, 8 aa, Homo Sapiens
FSSVLQEI

SEQ ID NO: 137898 - protein, 8 aa, Homo Sapiens
FSTNLQRL

SEQ ID NO: 137899 - protein, 8 aa, Homo Sapiens
FSVSLGEL

SEQ ID NO: 137900 - protein, 8 aa, Homo Sapiens
FSYAGFEM

SEQ ID NO: 137901 - protein, 8 aa, Homo Sapiens
FSYILPIL

SEQ ID NO: 137902 - protein, 8 aa, Homo Sapiens
FSYVSPEL

SEQ ID NO: 137903 - protein, 8 aa, Homo Sapiens
FTADPLSL

SEQ ID NO: 137904 - protein, 8 aa, Homo Sapiens
FTIIVAEL

SEQ ID NO: 137905 - protein, 8 aa, Homo Sapiens
FTLNLREV

SEQ ID NO: 137906 - protein, 8 aa, Homo Sapiens
FTMGGPAI

SEQ ID NO: 137907 - protein, 8 aa, Homo Sapiens
FTQKLQEL

SEQ ID NO: 137908 - protein, 8 aa, Homo Sapiens
FTVLIHEL

SEQ ID NO: 137909 - protein, 8 aa, Homo Sapiens
FTYLHRAL

SEQ ID NO: 137910 - protein, 8 aa, Homo Sapiens
FVAEFEEF

SEQ ID NO: 137911 - protein, 8 aa, Homo Sapiens
FVEVGRLG

SEQ ID NO: 137912 - protein, 8 aa, Homo Sapiens
FVEVGRVA

SEQ ID NO: 137913 - protein, 8 aa, Homo Sapiens
FVFTHSPF

SEQ ID NO: 137914 - protein, 8 aa, Homo Sapiens
FVIKRPEL

SEQ ID NO: 137915 - protein, 8 aa, Homo Sapiens
FVLLLQVL

SEQ ID NO: 137916 - protein, 8 aa, Homo Sapiens
FVNVVPTF

SEQ ID NO: 137917 - protein, 8 aa, Homo Sapiens
FVPVANEL

SEQ ID NO: 137918 - protein, 8 aa, Homo Sapiens
FVQVLETL

SEQ ID NO: 137919 - protein, 8 aa, Homo Sapiens
FVTELKEL

SEQ ID NO: 137920 - protein, 8 aa, Homo Sapiens
GGLRAELL

SEQ ID NO: 137921 - protein, 8 aa, Homo Sapiens
GIYDLPHL

SEQ ID NO: 137922 - protein, 8 aa, Homo Sapiens
GLGPALEF

SEQ ID NO: 137923 - protein, 8 aa, Homo Sapiens
GVFVLYEL

SEQ ID NO: 137924 - protein, 8 aa, Homo Sapiens
HAMELSEL

SEQ ID NO: 137925 - protein, 8 aa, Homo Sapiens
HILLRPTM

SEQ ID NO: 137926 - protein, 8 aa, Homo Sapiens
IAALLQEI

SEQ ID NO: 137927 - protein, 8 aa, Homo Sapiens
IAGHIMEF

SEQ ID NO: 137928 - protein, 8 aa, Homo Sapiens
IAGPVVEI

SEQ ID NO: 137929 - protein, 8 aa, Homo Sapiens
IAHLLTSL

SEQ ID NO: 137930 - protein, 8 aa, Homo Sapiens
IAHVLPAL

SEQ ID NO: 137931 - protein, 8 aa, Homo Sapiens
IAINRMPF

SEQ ID NO: 137932 - protein, 8 aa, Homo Sapiens
IALERPDI

SEQ ID NO: 137933 - protein, 8 aa, Homo Sapiens
IALKISQI

SEQ ID NO: 137934 - protein, 8 aa, Homo Sapiens
IAMQLPVL

SEQ ID NO: 137935 - protein, 8 aa, Homo Sapiens
IANYRPTL

SEQ ID NO: 137936 - protein, 8 aa, Homo Sapiens
IAQVLAEL

SEQ ID NO: 137937 - protein, 8 aa, Homo Sapiens
IATILREI

SEQ ID NO: 137938 - protein, 8 aa, Homo Sapiens
IAWPLSTL

SEQ ID NO: 137939 - protein, 8 aa, Homo Sapiens
IAYEFVEM

SEQ ID NO: 137940 - protein, 8 aa, Homo Sapiens
IAYIMPGL

SEQ ID NO: 137941 - protein, 8 aa, Homo Sapiens
IILLLRIA

SEQ ID NO: 137942 - protein, 8 aa, Homo Sapiens
ISAVRPVI

SEQ ID NO: 137943 - protein, 8 aa, Homo Sapiens
IVGKDLEF

SEQ ID NO: 137944 - protein, 8 aa, Homo Sapiens
IVGVILRY

SEQ ID NO: 137945 - protein, 8 aa, Homo Sapiens
IVYVTPEY

SEQ ID NO: 137946 - protein, 8 aa, Homo Sapiens
KAMVFLEY

SEQ ID NO: 137947 - protein, 8 aa, Homo Sapiens
LAAKLMEL

SEQ ID NO: 137948 - protein, 8 aa, Homo Sapiens
LAALLHET

SEQ ID NO: 137949 - protein, 8 aa, Homo Sapiens
LAFEFIQF

SEQ ID NO: 137950 - protein, 8 aa, Homo Sapiens
LAFHLAVL

SEQ ID NO: 137951 - protein, 8 aa, Homo Sapiens
LAFLLAEL

SEQ ID NO: 137952 - protein, 8 aa, Homo Sapiens
LAFLLLPR

SEQ ID NO: 137953 - protein, 8 aa, Homo Sapiens
LAFLVHEL

SEQ ID NO: 137954 - protein, 8 aa, Homo Sapiens
LAFVLQHL

SEQ ID NO: 137955 - protein, 8 aa, Homo Sapiens
LAGPALEL

SEQ ID NO: 137956 - protein, 8 aa, Homo Sapiens
LAGPPLEI

SEQ ID NO: 137957 - protein, 8 aa, Homo Sapiens
LAHHLVAL

SEQ ID NO: 137958 - protein, 8 aa, Homo Sapiens
LAKLLSQL

SEQ ID NO: 137959 - protein, 8 aa, Homo Sapiens
LAKLMSEL

SEQ ID NO: 137960 - protein, 8 aa, Homo Sapiens
LAKYLMEL

SEQ ID NO: 137961 - protein, 8 aa, Homo Sapiens
LALEIRSL

SEQ ID NO: 137962 - protein, 8 aa, Homo Sapiens
LALILKAM

SEQ ID NO: 137963 - protein, 8 aa, Homo Sapiens
LALPRPVI

SEQ ID NO: 137964 - protein, 8 aa, Homo Sapiens
LALQLAEM

SEQ ID NO: 137965 - protein, 8 aa, Homo Sapiens
LAMLLQET

SEQ ID NO: 137966 - protein, 8 aa, Homo Sapiens
LAQALHEM

SEQ ID NO: 137967 - protein, 8 aa, Homo Sapiens
LAQALQEL

SEQ ID NO: 137968 - protein, 8 aa, Homo Sapiens
LAQLLAEL

SEQ ID NO: 137969 - protein, 8 aa, Homo Sapiens
LATHLQEL

SEQ ID NO: 137970 - protein, 8 aa, Homo Sapiens
LATILAQL

SEQ ID NO: 137971 - protein, 8 aa, Homo Sapiens
LATVLQAV

SEQ ID NO: 137972 - protein, 8 aa, Homo Sapiens
LAVLLRQL

SEQ ID NO: 137973 - protein, 8 aa, Homo Sapiens
LAVLRPLL

SEQ ID NO: 137974 - protein, 8 aa, Homo Sapiens
LAYIHIVF

SEQ ID NO: 137975 - protein, 8 aa, Homo Sapiens
LAYLHTEL

SEQ ID NO: 137976 - protein, 8 aa, Homo Sapiens
LGHLLMEL

SEQ ID NO: 137977 - protein, 8 aa, Homo Sapiens
LIHEFVEY

SEQ ID NO: 137978 - protein, 8 aa, Homo Sapiens
LIKLLEVL

SEQ ID NO: 137979 - protein, 8 aa, Homo Sapiens
LITYLMEH

SEQ ID NO: 137980 - protein, 8 aa, Homo Sapiens
LIYLHAVL

SEQ ID NO: 137981 - protein, 8 aa, Homo Sapiens
LKALLGAL

SEQ ID NO: 137982 - protein, 8 aa, Homo Sapiens
LQQPRPLM

SEQ ID NO: 137983 - protein, 8 aa, Homo Sapiens
LSALLHEL

SEQ ID NO: 137984 - protein, 8 aa, Homo Sapiens
LSKTIAAL

SEQ ID NO: 137985 - protein, 8 aa, Homo Sapiens
LSLERPTM

SEQ ID NO: 137986 - protein, 8 aa, Homo Sapiens
LSNVLAAM

SEQ ID NO: 137987 - protein, 8 aa, Homo Sapiens
LSRLFRVF

SEQ ID NO: 137988 - protein, 8 aa, Homo Sapiens
LSYIFPTY

SEQ ID NO: 137989 - protein, 8 aa, Homo Sapiens
LTALLMVL

SEQ ID NO: 137990 - protein, 8 aa, Homo Sapiens
LTALLSEF

SEQ ID NO: 137991 - protein, 8 aa, Homo Sapiens
LTGPVLEL

SEQ ID NO: 137992 - protein, 8 aa, Homo Sapiens
LTHLLFEF

SEQ ID NO: 137993 - protein, 8 aa, Homo Sapiens
LTYELPTL

SEQ ID NO: 137994 - protein, 8 aa, Homo Sapiens
LTYVHNEL

SEQ ID NO: 137995 - protein, 8 aa, Homo Sapiens
LVMLLAEM

SEQ ID NO: 137996 - protein, 8 aa, Homo Sapiens
LVQPLREL

SEQ ID NO: 137997 - protein, 8 aa, Homo Sapiens
LVYQFKEM

SEQ ID NO: 137998 - protein, 8 aa, Homo Sapiens
MAFLLPLI

SEQ ID NO: 137999 - protein, 8 aa, Homo Sapiens
MAFTFAAF

SEQ ID NO: 138000 - protein, 8 aa, Homo Sapiens
MALVLEAL

SEQ ID NO: 138001 - protein, 8 aa, Homo Sapiens
MSTLLREI

SEQ ID NO: 138002 - protein, 8 aa, Homo Sapiens
MTILLSEV

SEQ ID NO: 138003 - protein, 8 aa, Homo Sapiens
MTVLLHEV

SEQ ID NO: 138004 - protein, 8 aa, Homo Sapiens
MTYVGAVF

SEQ ID NO: 138005 - protein, 8 aa, Homo Sapiens
MVGPILEM

SEQ ID NO: 138006 - protein, 8 aa, Homo Sapiens
NSAVLPEM

SEQ ID NO: 138007 - protein, 8 aa, Homo Sapiens
RIHIFSSF

SEQ ID NO: 138008 - protein, 8 aa, Homo Sapiens
SAFPLAAL

SEQ ID NO: 138009 - protein, 8 aa, Homo Sapiens
SALPRLSP

SEQ ID NO: 138010 - protein, 8 aa, Homo Sapiens
SALPRPSL

SEQ ID NO: 138011 - protein, 8 aa, Homo Sapiens
SAMLLAQL

SEQ ID NO: 138012 - protein, 8 aa, Homo Sapiens
SAQLLPVL

SEQ ID NO: 138013 - protein, 8 aa, Homo Sapiens
SFYNGLSF

SEQ ID NO: 138014 - protein, 8 aa, Homo Sapiens
SITPLSEL

SEQ ID NO: 138015 - protein, 8 aa, Homo Sapiens
SSVLLQAL

SEQ ID NO: 138016 - protein, 8 aa, Homo Sapiens
STYKFFEV

SEQ ID NO: 138017 - protein, 8 aa, Homo Sapiens
SVFEFLAF

SEQ ID NO: 138018 - protein, 8 aa, Homo Sapiens
TAFLLDAL

SEQ ID NO: 138019 - protein, 8 aa, Homo Sapiens
TSWIHPVM

SEQ ID NO: 138020 - protein, 8 aa, Homo Sapiens
VAAYLRAL

SEQ ID NO: 138021 - protein, 8 aa, Homo Sapiens
VAFIVGEM

SEQ ID NO: 138022 - protein, 8 aa, Homo Sapiens
VAIVRPSI

SEQ ID NO: 138023 - protein, 8 aa, Homo Sapiens
VALVLEEM

SEQ ID NO: 138024 - protein, 8 aa, Homo Sapiens
VALVLKEM

SEQ ID NO: 138025 - protein, 8 aa, Homo Sapiens
VAVGLYAM

SEQ ID NO: 138026 - protein, 8 aa, Homo Sapiens
VAVLRPEL

SEQ ID NO: 138027 - protein, 8 aa, Homo Sapiens
VAVPLPLH

SEQ ID NO: 138028 - protein, 8 aa, Homo Sapiens
VAYHQPTL

SEQ ID NO: 138029 - protein, 8 aa, Homo Sapiens
VFFVHEGY

SEQ ID NO: 138030 - protein, 8 aa, Homo Sapiens
VFRVGISF

SEQ ID NO: 138031 - protein, 8 aa, Homo Sapiens
VIYVLPML

SEQ ID NO: 138032 - protein, 8 aa, Homo Sapiens
VMSVGFLL

SEQ ID NO: 138033 - protein, 8 aa, Homo Sapiens
VNFEFPEF

SEQ ID NO: 138034 - protein, 8 aa, Homo Sapiens
VSFLLPTL

SEQ ID NO: 138035 - protein, 8 aa, Homo Sapiens
VSHVLAAL

SEQ ID NO: 138036 - protein, 8 aa, Homo Sapiens
VSTVLHEL

SEQ ID NO: 138037 - protein, 8 aa, Homo Sapiens
VTLLIQEL

SEQ ID NO: 138038 - protein, 8 aa, Homo Sapiens
WAAELSEL

SEQ ID NO: 138039 - protein, 8 aa, Homo Sapiens
YAAEIAIG

SEQ ID NO: 138040 - protein, 8 aa, Homo Sapiens
YAALHGEF

SEQ ID NO: 138041 - protein, 8 aa, Homo Sapiens
YAAQLPAL

SEQ ID NO: 138042 - protein, 8 aa, Homo Sapiens
YAFLHRTL

SEQ ID NO: 138043 - protein, 8 aa, Homo Sapiens
YAHLFEVF

SEQ ID NO: 138044 - protein, 8 aa, Homo Sapiens
YAHPLETL

SEQ ID NO: 138045 - protein, 8 aa, Homo Sapiens
YAHSLVEL

SEQ ID NO: 138046 - protein, 8 aa, Homo Sapiens
YAHYLLVL

SEQ ID NO: 138047 - protein, 8 aa, Homo Sapiens
YAIPQPDL

SEQ ID NO: 138048 - protein, 8 aa, Homo Sapiens
YAKLIAEL

SEQ ID NO: 138049 - protein, 8 aa, Homo Sapiens
YALLLQHL

SEQ ID NO: 138050 - protein, 8 aa, Homo Sapiens
YALLLTEH

SEQ ID NO: 138051 - protein, 8 aa, Homo Sapiens
YALPHAIL

SEQ ID NO: 138052 - protein, 8 aa, Homo Sapiens
YAQFLREM

SEQ ID NO: 138053 - protein, 8 aa, Homo Sapiens
YAQILRDL

SEQ ID NO: 138054 - protein, 8 aa, Homo Sapiens
YAQVFREH

SEQ ID NO: 138055 - protein, 8 aa, Homo Sapiens
YASFLEVL

SEQ ID NO: 138056 - protein, 8 aa, Homo Sapiens
YAVLLEAL

SEQ ID NO: 138057 - protein, 8 aa, Homo Sapiens
YAVQLVEM

SEQ ID NO: 138058 - protein, 8 aa, Homo Sapiens
YAWGLNEL

SEQ ID NO: 138059 - protein, 8 aa, Homo Sapiens
YAWVLDKL

SEQ ID NO: 138060 - protein, 8 aa, Homo Sapiens
YFLEHLAF

SEQ ID NO: 138061 - protein, 8 aa, Homo Sapiens
YFQLHRAL

SEQ ID NO: 138062 - protein, 8 aa, Homo Sapiens
YGIVLYEL

SEQ ID NO: 138063 - protein, 8 aa, Homo Sapiens
YGVLLHEL

SEQ ID NO: 138064 - protein, 8 aa, Homo Sapiens
YGVVLWEM

SEQ ID NO: 138065 - protein, 8 aa, Homo Sapiens
YGVVLYEL

SEQ ID NO: 138066 - protein, 8 aa, Homo Sapiens
YIAHLRQI

SEQ ID NO: 138067 - protein, 8 aa, Homo Sapiens
YITPMMEL

SEQ ID NO: 138068 - protein, 8 aa, Homo Sapiens
YLGKVLEL

SEQ ID NO: 138069 - protein, 8 aa, Homo Sapiens
YLGPILKF

SEQ ID NO: 138070 - protein, 8 aa, Homo Sapiens
YLILLQEM

SEQ ID NO: 138071 - protein, 8 aa, Homo Sapiens
YNFVFTSF

SEQ ID NO: 138072 - protein, 8 aa, Homo Sapiens
YSAPLPAL

SEQ ID NO: 138073 - protein, 8 aa, Homo Sapiens
YSFWLYEL

SEQ ID NO: 138074 - protein, 8 aa, Homo Sapiens
YSTIRPYL

SEQ ID NO: 138075 - protein, 8 aa, Homo Sapiens
YSTRLAVL

SEQ ID NO: 138076 - protein, 8 aa, Homo Sapiens
YSWDQPGL

SEQ ID NO: 138077 - protein, 8 aa, Homo Sapiens
YSWLLNVL

SEQ ID NO: 138078 - protein, 8 aa, Homo Sapiens
YTLNLHEL

SEQ ID NO: 138079 - protein, 8 aa, Homo Sapiens
YTQLLQEL

SEQ ID NO: 138080 - protein, 8 aa, Homo Sapiens
YTQLLTEM

SEQ ID NO: 138081 - protein, 8 aa, Homo Sapiens
YVANLTEL

SEQ ID NO: 138082 - protein, 8 aa, Homo Sapiens
YVFLISEL

SEQ ID NO: 138083 - protein, 8 aa, Homo Sapiens
YVFNLAEL

SEQ ID NO: 138084 - protein, 8 aa, Homo Sapiens
YVFNLRDL

SEQ ID NO: 138085 - protein, 8 aa, Homo Sapiens
YVQLMPAL

SEQ ID NO: 138086 - protein, 8 aa, Homo Sapiens
YVTELAEL

SEQ ID NO: 138087 - protein, 8 aa, Homo Sapiens
YVTILPEL

SEQ ID NO: 138088 - protein, 8 aa, Homo Sapiens
YWQNHPEL

SEQ ID NO: 138089 - protein, 9 aa, Homo Sapiens
AAAGGLHEF

SEQ ID NO: 138090 - protein, 9 aa, Homo Sapiens
AAANPTLAF

SEQ ID NO: 138091 - protein, 9 aa, Homo Sapiens
AAAPLLPMI

SEQ ID NO: 138092 - protein, 9 aa, Homo Sapiens
AAAPSLLIL

SEQ ID NO: 138093 - protein, 9 aa, Homo Sapiens
AAAVPRAAF

SEQ ID NO: 138094 - protein, 9 aa, Homo Sapiens
AAFADALEF

SEQ ID NO: 138095 - protein, 9 aa, Homo Sapiens
AAFDFPTSF

SEQ ID NO: 138096 - protein, 9 aa, Homo Sapiens
AAFDNFKEV

SEQ ID NO: 138097 - protein, 9 aa, Homo Sapiens
AAFQGFPSM

SEQ ID NO: 138098 - protein, 9 aa, Homo Sapiens
AAFTRALEY

SEQ ID NO: 138099 - protein, 9 aa, Homo Sapiens
AAFWAFTVF

SEQ ID NO: 138100 - protein, 9 aa, Homo Sapiens
AAIASLLYL

SEQ ID NO: 138101 - protein, 9 aa, Homo Sapiens
AAIAVLEEL

SEQ ID NO: 138102 - protein, 9 aa, Homo Sapiens
AAIDPRVQY

SEQ ID NO: 138103 - protein, 9 aa, Homo Sapiens
AAIGLVIYY

SEQ ID NO: 138104 - protein, 9 aa, Homo Sapiens
AAIKPGTPL

SEQ ID NO: 138105 - protein, 9 aa, Homo Sapiens
AALLFVEAF

SEQ ID NO: 138106 - protein, 9 aa, Homo Sapiens
AALPFTKSL

SEQ ID NO: 138107 - protein, 9 aa, Homo Sapiens
AALPIFSSF

SEQ ID NO: 138108 - protein, 9 aa, Homo Sapiens
AALPKATIL

SEQ ID NO: 138109 - protein, 9 aa, Homo Sapiens
AALPVYQEL

SEQ ID NO: 138110 - protein, 9 aa, Homo Sapiens
AAMKALQAL

SEQ ID NO: 138111 - protein, 9 aa, Homo Sapiens
AAMSHLLEM

SEQ ID NO: 138112 - protein, 9 aa, Homo Sapiens
AANLFAQTY

SEQ ID NO: 138113 - protein, 9 aa, Homo Sapiens
AANPHSFVF

SEQ ID NO: 138114 - protein, 9 aa, Homo Sapiens
AAPIRLLAA

SEQ ID NO: 138115 - protein, 9 aa, Homo Sapiens
AARFVSTPF

SEQ ID NO: 138116 - protein, 9 aa, Homo Sapiens
AATPVWLLF

SEQ ID NO: 138117 - protein, 9 aa, Homo Sapiens
AAYVFEDPF

SEQ ID NO: 138118 - protein, 9 aa, Homo Sapiens
AGVPLFLLE

SEQ ID NO: 138119 - protein, 9 aa, Homo Sapiens
AINPKLLQL

SEQ ID NO: 138120 - protein, 9 aa, Homo Sapiens
AIVKPGVPM

SEQ ID NO: 138121 - protein, 9 aa, Homo Sapiens
AIYDGFDGF

SEQ ID NO: 138122 - protein, 9 aa, Homo Sapiens
ALLSALQAL

SEQ ID NO: 138123 - protein, 9 aa, Homo Sapiens
ASHLHIHVF

SEQ ID NO: 138124 - protein, 9 aa, Homo Sapiens
ATYIFLQTF

SEQ ID NO: 138125 - protein, 9 aa, Homo Sapiens
AVFGDFEQF

SEQ ID NO: 138126 - protein, 9 aa, Homo Sapiens
AYAIYELAV

SEQ ID NO: 138127 - protein, 9 aa, Homo Sapiens
CAIPDLGPA

SEQ ID NO: 138128 - protein, 9 aa, Homo Sapiens
CAIPQVMAI

SEQ ID NO: 138129 - protein, 9 aa, Homo Sapiens
CAMPVAMEF

SEQ ID NO: 138130 - protein, 9 aa, Homo Sapiens
CASDKILEF

SEQ ID NO: 138131 - protein, 9 aa, Homo Sapiens
CINGKVLIM

SEQ ID NO: 138132 - protein, 9 aa, Homo Sapiens
CSSPHALVL

SEQ ID NO: 138133 - protein, 9 aa, Homo Sapiens
CTYGKPVTF

SEQ ID NO: 138134 - protein, 9 aa, Homo Sapiens
CVSPWIVTM

SEQ ID NO: 138135 - protein, 9 aa, Homo Sapiens
EVYDDFLHY

SEQ ID NO: 138136 - protein, 9 aa, Homo Sapiens
FAAASFMSY

SEQ ID NO: 138137 - protein, 9 aa, Homo Sapiens
FAADIISVL

SEQ ID NO: 138138 - protein, 9 aa, Homo Sapiens
FAADVRLMF

SEQ ID NO: 138139 - protein, 9 aa, Homo Sapiens
FAAKFVTSF

SEQ ID NO: 138140 - protein, 9 aa, Homo Sapiens
FAALHGPAL

SEQ ID NO: 138141 - protein, 9 aa, Homo Sapiens
FAANVYEAF

SEQ ID NO: 138142 - protein, 9 aa, Homo Sapiens
FAASGGFLH

SEQ ID NO: 138143 - protein, 9 aa, Homo Sapiens
FAASVAHLY

SEQ ID NO: 138144 - protein, 9 aa, Homo Sapiens
FAATHSLEF

SEQ ID NO: 138145 - protein, 9 aa, Homo Sapiens
FAATLEQVY

SEQ ID NO: 138146 - protein, 9 aa, Homo Sapiens
FADGFVLVY

SEQ ID NO: 138147 - protein, 9 aa, Homo Sapiens
FADGHVLEL

SEQ ID NO: 138148 - protein, 9 aa, Homo Sapiens
FADGVILLL

SEQ ID NO: 138149 - protein, 9 aa, Homo Sapiens
FADGVYLVL

SEQ ID NO: 138150 - protein, 9 aa, Homo Sapiens
FADPHGKVF

SEQ ID NO: 138151 - protein, 9 aa, Homo Sapiens
FAEDSLRVI

SEQ ID NO: 138152 - protein, 9 aa, Homo Sapiens
FAEGFVRAL

SEQ ID NO: 138153 - protein, 9 aa, Homo Sapiens
FAFDPSVNY

SEQ ID NO: 138154 - protein, 9 aa, Homo Sapiens
FAFEHSEEY

SEQ ID NO: 138155 - protein, 9 aa, Homo Sapiens
FAFLFNSEL

SEQ ID NO: 138156 - protein, 9 aa, Homo Sapiens
FAFPGEILM

SEQ ID NO: 138157 - protein, 9 aa, Homo Sapiens
FAFRNFLYL

SEQ ID NO: 138158 - protein, 9 aa, Homo Sapiens
FAFTPSRIY

SEQ ID NO: 138159 - protein, 9 aa, Homo Sapiens
FAFVTDNTY

SEQ ID NO: 138160 - protein, 9 aa, Homo Sapiens
FAGSFLEYY

SEQ ID NO: 138161 - protein, 9 aa, Homo Sapiens
FAHDSTRVI

SEQ ID NO: 138162 - protein, 9 aa, Homo Sapiens
FAHEVGHNF

SEQ ID NO: 138163 - protein, 9 aa, Homo Sapiens
FAHLINVEF

SEQ ID NO: 138164 - protein, 9 aa, Homo Sapiens
FAHLPKSTF

SEQ ID NO: 138165 - protein, 9 aa, Homo Sapiens
FAHLRLEVL

SEQ ID NO: 138166 - protein, 9 aa, Homo Sapiens
FAHPYQYEL

SEQ ID NO: 138167 - protein, 9 aa, Homo Sapiens
FAIDPHLLL

SEQ ID NO: 138168 - protein, 9 aa, Homo Sapiens
FAIDSSHPW

SEQ ID NO: 138169 - protein, 9 aa, Homo Sapiens
FAIGILCSL

SEQ ID NO: 138170 - protein, 9 aa, Homo Sapiens
FAIKSLRKL

SEQ ID NO: 138171 - protein, 9 aa, Homo Sapiens
FAILRQAEL

SEQ ID NO: 138172 - protein, 9 aa, Homo Sapiens
FAINNSKSF

SEQ ID NO: 138173 - protein, 9 aa, Homo Sapiens
FAIPGSSFL

SEQ ID NO: 138174 - protein, 9 aa, Homo Sapiens
FAIPLIEKL

SEQ ID NO: 138175 - protein, 9 aa, Homo Sapiens
FAIPMIHAV

SEQ ID NO: 138176 - protein, 9 aa, Homo Sapiens
FAIPVGSGL

SEQ ID NO: 138177 - protein, 9 aa, Homo Sapiens
FAIQRTTNF

SEQ ID NO: 138178 - protein, 9 aa, Homo Sapiens
FAIRRLPAF

SEQ ID NO: 138179 - protein, 9 aa, Homo Sapiens
FAIRSLAEL

SEQ ID NO: 138180 - protein, 9 aa, Homo Sapiens
FAISIKYNV

SEQ ID NO: 138181 - protein, 9 aa, Homo Sapiens
FAISILQQI

SEQ ID NO: 138182 - protein, 9 aa, Homo Sapiens
FAIWHIIAF

SEQ ID NO: 138183 - protein, 9 aa, Homo Sapiens
FAIYKMSFF

SEQ ID NO: 138184 - protein, 9 aa, Homo Sapiens
FAKPENIDL

SEQ ID NO: 138185 - protein, 9 aa, Homo Sapiens
FALDSGLEI

SEQ ID NO: 138186 - protein, 9 aa, Homo Sapiens
FALGAGTAL

SEQ ID NO: 138187 - protein, 9 aa, Homo Sapiens
FALGPTISF

SEQ ID NO: 138188 - protein, 9 aa, Homo Sapiens
FALGSPIAM

SEQ ID NO: 138189 - protein, 9 aa, Homo Sapiens
FALGVYRTL

SEQ ID NO: 138190 - protein, 9 aa, Homo Sapiens
FALHKTLEF

SEQ ID NO: 138191 - protein, 9 aa, Homo Sapiens
FALHSASVF

SEQ ID NO: 138192 - protein, 9 aa, Homo Sapiens
FALLPRLEY

SEQ ID NO: 138193 - protein, 9 aa, Homo Sapiens
FALNLFKHL

SEQ ID NO: 138194 - protein, 9 aa, Homo Sapiens
FALPFGRTA

SEQ ID NO: 138195 - protein, 9 aa, Homo Sapiens
FALPILNAL

SEQ ID NO: 138196 - protein, 9 aa, Homo Sapiens
FALPVGLIV

SEQ ID NO: 138197 - protein, 9 aa, Homo Sapiens
FALPYIRDV

SEQ ID NO: 138198 - protein, 9 aa, Homo Sapiens
FALPYVIVL

SEQ ID NO: 138199 - protein, 9 aa, Homo Sapiens
FALSQPRAM

SEQ ID NO: 138200 - protein, 9 aa, Homo Sapiens
FALSVTNPL

SEQ ID NO: 138201 - protein, 9 aa, Homo Sapiens
FALVFPLMY

SEQ ID NO: 138202 - protein, 9 aa, Homo Sapiens
FAMDVYKNL

SEQ ID NO: 138203 - protein, 9 aa, Homo Sapiens
FAMEFVKYY

SEQ ID NO: 138204 - protein, 9 aa, Homo Sapiens
FAMPPPHGM

SEQ ID NO: 138205 - protein, 9 aa, Homo Sapiens
FAMPSSTPL

SEQ ID NO: 138206 - protein, 9 aa, Homo Sapiens
FAMPYFIQV

SEQ ID NO: 138207 - protein, 9 aa, Homo Sapiens
FAMTLTGPL

SEQ ID NO: 138208 - protein, 9 aa, Homo Sapiens
FANDATFEI

SEQ ID NO: 138209 - protein, 9 aa, Homo Sapiens
FANEPFADF

SEQ ID NO: 138210 - protein, 9 aa, Homo Sapiens
FANLPNQVY

SEQ ID NO: 138211 - protein, 9 aa, Homo Sapiens
FANNVQLSL

SEQ ID NO: 138212 - protein, 9 aa, Homo Sapiens
FAQDVGRMF

SEQ ID NO: 138213 - protein, 9 aa, Homo Sapiens
FAQEAISVL

SEQ ID NO: 138214 - protein, 9 aa, Homo Sapiens
FAQEALTVL

SEQ ID NO: 138215 - protein, 9 aa, Homo Sapiens
FAQPGSFEY

SEQ ID NO: 138216 - protein, 9 aa, Homo Sapiens
FAQPSGLSL

SEQ ID NO: 138217 - protein, 9 aa, Homo Sapiens
FARPASPSL

SEQ ID NO: 138218 - protein, 9 aa, Homo Sapiens
FARVPVATY

SEQ ID NO: 138219 - protein, 9 aa, Homo Sapiens
FASDVQFVL

SEQ ID NO: 138220 - protein, 9 aa, Homo Sapiens
FASEVSNVL

SEQ ID NO: 138221 - protein, 9 aa, Homo Sapiens
FASEYPLIL

SEQ ID NO: 138222 - protein, 9 aa, Homo Sapiens
FASFPHMVL

SEQ ID NO: 138223 - protein, 9 aa, Homo Sapiens
FASGAFLHI

SEQ ID NO: 138224 - protein, 9 aa, Homo Sapiens
FASHVSPEV

SEQ ID NO: 138225 - protein, 9 aa, Homo Sapiens
FASIPGLEF

SEQ ID NO: 138226 - protein, 9 aa, Homo Sapiens
FASTILHLV

SEQ ID NO: 138227 - protein, 9 aa, Homo Sapiens
FASYATIIL

SEQ ID NO: 138228 - protein, 9 aa, Homo Sapiens
FATDAILAT

SEQ ID NO: 138229 - protein, 9 aa, Homo Sapiens
FATDSGLEF

SEQ ID NO: 138230 - protein, 9 aa, Homo Sapiens
FATFPSSAF

SEQ ID NO: 138231 - protein, 9 aa, Homo Sapiens
FATGVWHQM

SEQ ID NO: 138232 - protein, 9 aa, Homo Sapiens
FATMVRPVA

SEQ ID NO: 138233 - protein, 9 aa, Homo Sapiens
FATPVFITK

SEQ ID NO: 138234 - protein, 9 aa, Homo Sapiens
FATTSPLVL

SEQ ID NO: 138235 - protein, 9 aa, Homo Sapiens
FAVAIYAVY

SEQ ID NO: 138236 - protein, 9 aa, Homo Sapiens
FAVAMHLVY

SEQ ID NO: 138237 - protein, 9 aa, Homo Sapiens
FAVARLEIL

SEQ ID NO: 138238 - protein, 9 aa, Homo Sapiens
FAVDSLRQL

SEQ ID NO: 138239 - protein, 9 aa, Homo Sapiens
FAVGSFHTL

SEQ ID NO: 138240 - protein, 9 aa, Homo Sapiens
FAVGVQQVL

SEQ ID NO: 138241 - protein, 9 aa, Homo Sapiens
FAVIAHVGM

SEQ ID NO: 138242 - protein, 9 aa, Homo Sapiens
FAVISRHSL

SEQ ID NO: 138243 - protein, 9 aa, Homo Sapiens
FAVNMFRTL

SEQ ID NO: 138244 - protein, 9 aa, Homo Sapiens
FAVSDGLEL

SEQ ID NO: 138245 - protein, 9 aa, Homo Sapiens
FAYAHTLAL

SEQ ID NO: 138246 - protein, 9 aa, Homo Sapiens
FAYEGPMYL

SEQ ID NO: 138247 - protein, 9 aa, Homo Sapiens
FAYHYPYTY

SEQ ID NO: 138248 - protein, 9 aa, Homo Sapiens
FAYKDYLSF

SEQ ID NO: 138249 - protein, 9 aa, Homo Sapiens
FAYLGRLAH

SEQ ID NO: 138250 - protein, 9 aa, Homo Sapiens
FAYMPNNSL

SEQ ID NO: 138251 - protein, 9 aa, Homo Sapiens
FAYNFREEL

SEQ ID NO: 138252 - protein, 9 aa, Homo Sapiens
FAYPAIRYL

SEQ ID NO: 138253 - protein, 9 aa, Homo Sapiens
FAYPAPLEV

SEQ ID NO: 138254 - protein, 9 aa, Homo Sapiens
FAYRGFKYL

SEQ ID NO: 138255 - protein, 9 aa, Homo Sapiens
FAYSSRIAI

SEQ ID NO: 138256 - protein, 9 aa, Homo Sapiens
FAYTARISV

SEQ ID NO: 138257 - protein, 9 aa, Homo Sapiens
FAYYRDLVF

SEQ ID NO: 138258 - protein, 9 aa, Homo Sapiens
FAYYRVGEY

SEQ ID NO: 138259 - protein, 9 aa, Homo Sapiens
FCMDRALEF

SEQ ID NO: 138260 - protein, 9 aa, Homo Sapiens
FCVDSITAL

SEQ ID NO: 138261 - protein, 9 aa, Homo Sapiens
FFFTARTSF

SEQ ID NO: 138262 - protein, 9 aa, Homo Sapiens
FFYKFFQEF

SEQ ID NO: 138263 - protein, 9 aa, Homo Sapiens
FFYQRLVEF

SEQ ID NO: 138264 - protein, 9 aa, Homo Sapiens
FGEMGGKFM

SEQ ID NO: 138265 - protein, 9 aa, Homo Sapiens
FGFVRFTEY

SEQ ID NO: 138266 - protein, 9 aa, Homo Sapiens
FGHYFETTY

SEQ ID NO: 138267 - protein, 9 aa, Homo Sapiens
FGIDRPAEL

SEQ ID NO: 138268 - protein, 9 aa, Homo Sapiens
FGNNKLTTF

SEQ ID NO: 138269 - protein, 9 aa, Homo Sapiens
FGSEFSPEL

SEQ ID NO: 138270 - protein, 9 aa, Homo Sapiens
FGVIPSTPL

SEQ ID NO: 138271 - protein, 9 aa, Homo Sapiens
FIDKQLELL

SEQ ID NO: 138272 - protein, 9 aa, Homo Sapiens
FIIDDKGIL

SEQ ID NO: 138273 - protein, 9 aa, Homo Sapiens
FIIQGLRSV

SEQ ID NO: 138274 - protein, 9 aa, Homo Sapiens
FIISRTQAL

SEQ ID NO: 138275 - protein, 9 aa, Homo Sapiens
FILEHIMVI

SEQ ID NO: 138276 - protein, 9 aa, Homo Sapiens
FIMDRAQAL

SEQ ID NO: 138277 - protein, 9 aa, Homo Sapiens
FIMGKTIEF

SEQ ID NO: 138278 - protein, 9 aa, Homo Sapiens
FIMINPLEY

SEQ ID NO: 138279 - protein, 9 aa, Homo Sapiens
FINPKPITY

SEQ ID NO: 138280 - protein, 9 aa, Homo Sapiens
FIPFLPLEY

SEQ ID NO: 138281 - protein, 9 aa, Homo Sapiens
FIRVSGSEL

SEQ ID NO: 138282 - protein, 9 aa, Homo Sapiens
FIRVVGSEF

SEQ ID NO: 138283 - protein, 9 aa, Homo Sapiens
FIVDARPAM

SEQ ID NO: 138284 - protein, 9 aa, Homo Sapiens
FIVEETLPL

SEQ ID NO: 138285 - protein, 9 aa, Homo Sapiens
FIYHLPQEF

SEQ ID NO: 138286 - protein, 9 aa, Homo Sapiens
FIYLHLSYY

SEQ ID NO: 138287 - protein, 9 aa, Homo Sapiens
FLADPVSNM

SEQ ID NO: 138288 - protein, 9 aa, Homo Sapiens
FLANVSTVL

SEQ ID NO: 138289 - protein, 9 aa, Homo Sapiens
FLAPLVTEY

SEQ ID NO: 138290 - protein, 9 aa, Homo Sapiens
FLCGVMKTY

SEQ ID NO: 138291 - protein, 9 aa, Homo Sapiens
FLFDGSPTY

SEQ ID NO: 138292 - protein, 9 aa, Homo Sapiens
FLFSKFIEL

SEQ ID NO: 138293 - protein, 9 aa, Homo Sapiens
FLHEFSMAY

SEQ ID NO: 138294 - protein, 9 aa, Homo Sapiens
FLIDRSPEY

SEQ ID NO: 138295 - protein, 9 aa, Homo Sapiens
FLIEPFVPH

SEQ ID NO: 138296 - protein, 9 aa, Homo Sapiens
FLKLFITEF

SEQ ID NO: 138297 - protein, 9 aa, Homo Sapiens
FLLDRLLQY

SEQ ID NO: 138298 - protein, 9 aa, Homo Sapiens
FLLPVINEM

SEQ ID NO: 138299 - protein, 9 aa, Homo Sapiens
FLMDPFAIH

SEQ ID NO: 138300 - protein, 9 aa, Homo Sapiens
FLNDSYLKY

SEQ ID NO: 138301 - protein, 9 aa, Homo Sapiens
FLNFHYLTY

SEQ ID NO: 138302 - protein, 9 aa, Homo Sapiens
FLNKEILEL

SEQ ID NO: 138303 - protein, 9 aa, Homo Sapiens
FLPEAPAEL

SEQ ID NO: 138304 - protein, 9 aa, Homo Sapiens
FLRDKIASY

SEQ ID NO: 138305 - protein, 9 aa, Homo Sapiens
FLREWVESM

SEQ ID NO: 138306 - protein, 9 aa, Homo Sapiens
FLRIAFNSY

SEQ ID NO: 138307 - protein, 9 aa, Homo Sapiens
FLRVPTASY

SEQ ID NO: 138308 - protein, 9 aa, Homo Sapiens
FLYDKALTF

SEQ ID NO: 138309 - protein, 9 aa, Homo Sapiens
FLYPFFGVL

SEQ ID NO: 138310 - protein, 9 aa, Homo Sapiens
FLYPFPLAL

SEQ ID NO: 138311 - protein, 9 aa, Homo Sapiens
FLYSGHLAL

SEQ ID NO: 138312 - protein, 9 aa, Homo Sapiens
FNRWFAEKF

SEQ ID NO: 138313 - protein, 9 aa, Homo Sapiens
FNYPGGVAM

SEQ ID NO: 138314 - protein, 9 aa, Homo Sapiens
FPVFLAILI

SEQ ID NO: 138315 - protein, 9 aa, Homo Sapiens
FQNPFRSEL

SEQ ID NO: 138316 - protein, 9 aa, Homo Sapiens
FQNPSTVTL

SEQ ID NO: 138317 - protein, 9 aa, Homo Sapiens
FQRPNALAV

SEQ ID NO: 138318 - protein, 9 aa, Homo Sapiens
FQYESKVFY

SEQ ID NO: 138319 - protein, 9 aa, Homo Sapiens
FQYPDTRYL

SEQ ID NO: 138320 - protein, 9 aa, Homo Sapiens
FQYSKSPSL

SEQ ID NO: 138321 - protein, 9 aa, Homo Sapiens
FSAPLFLSH

SEQ ID NO: 138322 - protein, 9 aa, Homo Sapiens
FSEPFHLIV

SEQ ID NO: 138323 - protein, 9 aa, Homo Sapiens
FSEPHARFY

SEQ ID NO: 138324 - protein, 9 aa, Homo Sapiens
FSFDGPEIM

SEQ ID NO: 138325 - protein, 9 aa, Homo Sapiens
FSFHHVLSL

SEQ ID NO: 138326 - protein, 9 aa, Homo Sapiens
FSFVFKPVF

SEQ ID NO: 138327 - protein, 9 aa, Homo Sapiens
FSFVRITAL

SEQ ID NO: 138328 - protein, 9 aa, Homo Sapiens
FSFYFHEAL

SEQ ID NO: 138329 - protein, 9 aa, Homo Sapiens
FSHAQTVVL

SEQ ID NO: 138330 - protein, 9 aa, Homo Sapiens
FSHEVGSEL

SEQ ID NO: 138331 - protein, 9 aa, Homo Sapiens
FSIEPWLKV

SEQ ID NO: 138332 - protein, 9 aa, Homo Sapiens
FSIPILMQL

SEQ ID NO: 138333 - protein, 9 aa, Homo Sapiens
FSITPLSEL

SEQ ID NO: 138334 - protein, 9 aa, Homo Sapiens
FSKWWINEF

SEQ ID NO: 138335 - protein, 9 aa, Homo Sapiens
FSLEELRVA

SEQ ID NO: 138336 - protein, 9 aa, Homo Sapiens
FSLPPGHAV

SEQ ID NO: 138337 - protein, 9 aa, Homo Sapiens
FSNAHMIMY

SEQ ID NO: 138338 - protein, 9 aa, Homo Sapiens
FSNDIPHVV

SEQ ID NO: 138339 - protein, 9 aa, Homo Sapiens
FSNGHIKVL

SEQ ID NO: 138340 - protein, 9 aa, Homo Sapiens
FSNPFFVNY

SEQ ID NO: 138341 - protein, 9 aa, Homo Sapiens
FSNPRALYL

SEQ ID NO: 138342 - protein, 9 aa, Homo Sapiens
FSNPYSIEY

SEQ ID NO: 138343 - protein, 9 aa, Homo Sapiens
FSPFHASVL

SEQ ID NO: 138344 - protein, 9 aa, Homo Sapiens
FSQDHLVIY

SEQ ID NO: 138345 - protein, 9 aa, Homo Sapiens
FSQSSLALH

SEQ ID NO: 138346 - protein, 9 aa, Homo Sapiens
FSSDVTHEM

SEQ ID NO: 138347 - protein, 9 aa, Homo Sapiens
FSSPVCMAF

SEQ ID NO: 138348 - protein, 9 aa, Homo Sapiens
FSSWVQLEV

SEQ ID NO: 138349 - protein, 9 aa, Homo Sapiens
FSTPVFNLV

SEQ ID NO: 138350 - protein, 9 aa, Homo Sapiens
FSVDQLMEL

SEQ ID NO: 138351 - protein, 9 aa, Homo Sapiens
FSVDSPRIY

SEQ ID NO: 138352 - protein, 9 aa, Homo Sapiens
FSVEGQLEF

SEQ ID NO: 138353 - protein, 9 aa, Homo Sapiens
FSVNLFRTL

SEQ ID NO: 138354 - protein, 9 aa, Homo Sapiens
FSWLFHTVY

SEQ ID NO: 138355 - protein, 9 aa, Homo Sapiens
FSYAFPKAV

SEQ ID NO: 138356 - protein, 9 aa, Homo Sapiens
FSYAFPKEF

SEQ ID NO: 138357 - protein, 9 aa, Homo Sapiens
FSYDTFVDY

SEQ ID NO: 138358 - protein, 9 aa, Homo Sapiens
FSYVTPRAF

SEQ ID NO: 138359 - protein, 9 aa, Homo Sapiens
FTADPLSLL

SEQ ID NO: 138360 - protein, 9 aa, Homo Sapiens
FTAPATVSL

SEQ ID NO: 138361 - protein, 9 aa, Homo Sapiens
FTDASFLTL

SEQ ID NO: 138362 - protein, 9 aa, Homo Sapiens
FTIFRTISV

SEQ ID NO: 138363 - protein, 9 aa, Homo Sapiens
FTIKELREM

SEQ ID NO: 138364 - protein, 9 aa, Homo Sapiens
FTMPLHMTF

SEQ ID NO: 138365 - protein, 9 aa, Homo Sapiens
FTNPWTKEL

SEQ ID NO: 138366 - protein, 9 aa, Homo Sapiens
FTSEKFLVM

SEQ ID NO: 138367 - protein, 9 aa, Homo Sapiens
FTSLPGSTM

SEQ ID NO: 138368 - protein, 9 aa, Homo Sapiens
FTSPVSLEA

SEQ ID NO: 138369 - protein, 9 aa, Homo Sapiens
FTTHVMNLL

SEQ ID NO: 138370 - protein, 9 aa, Homo Sapiens
FTVGKLGPF

SEQ ID NO: 138371 - protein, 9 aa, Homo Sapiens
FTVMPGQTL

SEQ ID NO: 138372 - protein, 9 aa, Homo Sapiens
FTVPHTHVF

SEQ ID NO: 138373 - protein, 9 aa, Homo Sapiens
FTYDQRTEF

SEQ ID NO: 138374 - protein, 9 aa, Homo Sapiens
FTYKGLRAL

SEQ ID NO: 138375 - protein, 9 aa, Homo Sapiens
FVADVRLIF

SEQ ID NO: 138376 - protein, 9 aa, Homo Sapiens
FVALPGVAV

SEQ ID NO: 138377 - protein, 9 aa, Homo Sapiens
FVAPPTAAV

SEQ ID NO: 138378 - protein, 9 aa, Homo Sapiens
FVEVGRVAY

SEQ ID NO: 138379 - protein, 9 aa, Homo Sapiens
FVFGFRTHF

SEQ ID NO: 138380 - protein, 9 aa, Homo Sapiens
FVFKGFDAL

SEQ ID NO: 138381 - protein, 9 aa, Homo Sapiens
FVFPGELLL

SEQ ID NO: 138382 - protein, 9 aa, Homo Sapiens
FVHEFFYSF

SEQ ID NO: 138383 - protein, 9 aa, Homo Sapiens
FVIETARQL

SEQ ID NO: 138384 - protein, 9 aa, Homo Sapiens
FVIHNLPVL

SEQ ID NO: 138385 - protein, 9 aa, Homo Sapiens
FVIPVVQAL

SEQ ID NO: 138386 - protein, 9 aa, Homo Sapiens
FVKGQFHEF

SEQ ID NO: 138387 - protein, 9 aa, Homo Sapiens
FVKGWGAEY

SEQ ID NO: 138388 - protein, 9 aa, Homo Sapiens
FVKPAFEEF

SEQ ID NO: 138389 - protein, 9 aa, Homo Sapiens
FVNDYILYY

SEQ ID NO: 138390 - protein, 9 aa, Homo Sapiens
FVNPGVVEF

SEQ ID NO: 138391 - protein, 9 aa, Homo Sapiens
FVNPHVSSF

SEQ ID NO: 138392 - protein, 9 aa, Homo Sapiens
FVNPSLRVL

SEQ ID NO: 138393 - protein, 9 aa, Homo Sapiens
FVNPTSFVY

SEQ ID NO: 138394 - protein, 9 aa, Homo Sapiens
FVNPVQVVL

SEQ ID NO: 138395 - protein, 9 aa, Homo Sapiens
FVRDMIREV

SEQ ID NO: 138396 - protein, 9 aa, Homo Sapiens
FVRDYMAVL

SEQ ID NO: 138397 - protein, 9 aa, Homo Sapiens
FVSPSLAVH

SEQ ID NO: 138398 - protein, 9 aa, Homo Sapiens
FVSSFMSEL

SEQ ID NO: 138399 - protein, 9 aa, Homo Sapiens
FVVDRLIAL

SEQ ID NO: 138400 - protein, 9 aa, Homo Sapiens
FVVPYGTPL

SEQ ID NO: 138401 - protein, 9 aa, Homo Sapiens
FVYENPISL

SEQ ID NO: 138402 - protein, 9 aa, Homo Sapiens
FVYGESVEL

SEQ ID NO: 138403 - protein, 9 aa, Homo Sapiens
FVYITDNAY

SEQ ID NO: 138404 - protein, 9 aa, Homo Sapiens
FVYKGGKIY

SEQ ID NO: 138405 - protein, 9 aa, Homo Sapiens
FVYLRQPYY

SEQ ID NO: 138406 - protein, 9 aa, Homo Sapiens
FVYPFGATL

SEQ ID NO: 138407 - protein, 9 aa, Homo Sapiens
GAAGVHFIY

SEQ ID NO: 138408 - protein, 9 aa, Homo Sapiens
GALDLLKEL

SEQ ID NO: 138409 - protein, 9 aa, Homo Sapiens
GAMDLLREL

SEQ ID NO: 138410 - protein, 9 aa, Homo Sapiens
GAMGIMLVY

SEQ ID NO: 138411 - protein, 9 aa, Homo Sapiens
GAVDPLLAL

SEQ ID NO: 138412 - protein, 9 aa, Homo Sapiens
GAVPIFIEL

SEQ ID NO: 138413 - protein, 9 aa, Homo Sapiens
GGLFGTSSF

SEQ ID NO: 138414 - protein, 9 aa, Homo Sapiens
GIYPHKLVF

SEQ ID NO: 138415 - protein, 9 aa, Homo Sapiens
GLAEFLQSF

SEQ ID NO: 138416 - protein, 9 aa, Homo Sapiens
GVFQFKVDY

SEQ ID NO: 138417 - protein, 9 aa, Homo Sapiens
GVYLFTEAY

SEQ ID NO: 138418 - protein, 9 aa, Homo Sapiens
HAAGFFIAF

SEQ ID NO: 138419 - protein, 9 aa, Homo Sapiens
HAASVFLTL

SEQ ID NO: 138420 - protein, 9 aa, Homo Sapiens
HADDSFLVL

SEQ ID NO: 138421 - protein, 9 aa, Homo Sapiens
HAFVTEVAY

SEQ ID NO: 138422 - protein, 9 aa, Homo Sapiens
HAIPPTLAM

SEQ ID NO: 138423 - protein, 9 aa, Homo Sapiens
HAPFTATSL

SEQ ID NO: 138424 - protein, 9 aa, Homo Sapiens
HAYDNFLEH

SEQ ID NO: 138425 - protein, 9 aa, Homo Sapiens
HAYIHSVQF

SEQ ID NO: 138426 - protein, 9 aa, Homo Sapiens
HLRDYFEEY

SEQ ID NO: 138427 - protein, 9 aa, Homo Sapiens
HLRDYFEQY

SEQ ID NO: 138428 - protein, 9 aa, Homo Sapiens
HQDISLLYT

SEQ ID NO: 138429 - protein, 9 aa, Homo Sapiens
HSFYNGLSF

SEQ ID NO: 138430 - protein, 9 aa, Homo Sapiens
HSHLLKTPL

SEQ ID NO: 138431 - protein, 9 aa, Homo Sapiens
HSRLFDQAF

SEQ ID NO: 138432 - protein, 9 aa, Homo Sapiens
IAAPNMKAM

SEQ ID NO: 138433 - protein, 9 aa, Homo Sapiens
IAAVPATAM

SEQ ID NO: 138434 - protein, 9 aa, Homo Sapiens
IAFDPRSAY

SEQ ID NO: 138435 - protein, 9 aa, Homo Sapiens
IAFHFRVYF

SEQ ID NO: 138436 - protein, 9 aa, Homo Sapiens
IAHGFFSVY

SEQ ID NO: 138437 - protein, 9 aa, Homo Sapiens
IAHLFNVEW

SEQ ID NO: 138438 - protein, 9 aa, Homo Sapiens
IAHMYQVEF

SEQ ID NO: 138439 - protein, 9 aa, Homo Sapiens
IAIDVIDAY

SEQ ID NO: 138440 - protein, 9 aa, Homo Sapiens
IAIFKLPAF

SEQ ID NO: 138441 - protein, 9 aa, Homo Sapiens
IAIPFGTAL

SEQ ID NO: 138442 - protein, 9 aa, Homo Sapiens
IAIPVTQEL

SEQ ID NO: 138443 - protein, 9 aa, Homo Sapiens
IAIPVTVAF

SEQ ID NO: 138444 - protein, 9 aa, Homo Sapiens
IAISRTPVL

SEQ ID NO: 138445 - protein, 9 aa, Homo Sapiens
IAMPLHMIF

SEQ ID NO: 138446 - protein, 9 aa, Homo Sapiens
IANHQVLII

SEQ ID NO: 138447 - protein, 9 aa, Homo Sapiens
IAPGVTHEL

SEQ ID NO: 138448 - protein, 9 aa, Homo Sapiens
IAQDFKTDL

SEQ ID NO: 138449 - protein, 9 aa, Homo Sapiens
IAQPVRSFL

SEQ ID NO: 138450 - protein, 9 aa, Homo Sapiens
IARFFTEYF

SEQ ID NO: 138451 - protein, 9 aa, Homo Sapiens
IARLPSSTL

SEQ ID NO: 138452 - protein, 9 aa, Homo Sapiens
IASPALDTL

SEQ ID NO: 138453 - protein, 9 aa, Homo Sapiens
IASPVIAAV

SEQ ID NO: 138454 - protein, 9 aa, Homo Sapiens
IASPVQPVL

SEQ ID NO: 138455 - protein, 9 aa, Homo Sapiens
IATEIILEI

SEQ ID NO: 138456 - protein, 9 aa, Homo Sapiens
IAVYHLQEL

SEQ ID NO: 138457 - protein, 9 aa, Homo Sapiens
IAYDVTYSL

SEQ ID NO: 138458 - protein, 9 aa, Homo Sapiens
IAYIRDLAL

SEQ ID NO: 138459 - protein, 9 aa, Homo Sapiens
IAYTFARAF

SEQ ID NO: 138460 - protein, 9 aa, Homo Sapiens
IIAEPGRYY

SEQ ID NO: 138461 - protein, 9 aa, Homo Sapiens
IIAPPERKY

SEQ ID NO: 138462 - protein, 9 aa, Homo Sapiens
IIEPSLRQL

SEQ ID NO: 138463 - protein, 9 aa, Homo Sapiens
IINDLLQSL

SEQ ID NO: 138464 - protein, 9 aa, Homo Sapiens
IIYHLFDAF

SEQ ID NO: 138465 - protein, 9 aa, Homo Sapiens
ILGPPGSVY

SEQ ID NO: 138466 - protein, 9 aa, Homo Sapiens
ILMDDLSPK

SEQ ID NO: 138467 - protein, 9 aa, Homo Sapiens
ILYEFPRVF

SEQ ID NO: 138468 - protein, 9 aa, Homo Sapiens
ILYIRNLPY

SEQ ID NO: 138469 - protein, 9 aa, Homo Sapiens
ISEENFRVM

SEQ ID NO: 138470 - protein, 9 aa, Homo Sapiens
ISSPVILQF

SEQ ID NO: 138471 - protein, 9 aa, Homo Sapiens
ISTPVIRTF

SEQ ID NO: 138472 - protein, 9 aa, Homo Sapiens
IVIDPKNPL

SEQ ID NO: 138473 - protein, 9 aa, Homo Sapiens
IVNGHTLLV

SEQ ID NO: 138474 - protein, 9 aa, Homo Sapiens
IYRWFNISF

SEQ ID NO: 138475 - protein, 9 aa, Homo Sapiens
KAFDFPSSF

SEQ ID NO: 138476 - protein, 9 aa, Homo Sapiens
KAFPFHIIF

SEQ ID NO: 138477 - protein, 9 aa, Homo Sapiens
KAFPFYSSY

SEQ ID NO: 138478 - protein, 9 aa, Homo Sapiens
KAFSFLSSF

SEQ ID NO: 138479 - protein, 9 aa, Homo Sapiens
KAFSFPSSF

SEQ ID NO: 138480 - protein, 9 aa, Homo Sapiens
KAFTDFLAF

SEQ ID NO: 138481 - protein, 9 aa, Homo Sapiens
KAFVFSVAL

SEQ ID NO: 138482 - protein, 9 aa, Homo Sapiens
KAIELLQEF

SEQ ID NO: 138483 - protein, 9 aa, Homo Sapiens
KAINPINTF

SEQ ID NO: 138484 - protein, 9 aa, Homo Sapiens
KAIYHLEAF

SEQ ID NO: 138485 - protein, 9 aa, Homo Sapiens
KALEVFPEF

SEQ ID NO: 138486 - protein, 9 aa, Homo Sapiens
KANPALYVL

SEQ ID NO: 138487 - protein, 9 aa, Homo Sapiens
KARPFFNEF

SEQ ID NO: 138488 - protein, 9 aa, Homo Sapiens
KIHLFSMAF

SEQ ID NO: 138489 - protein, 9 aa, Homo Sapiens
KINEAFIEM

SEQ ID NO: 138490 - protein, 9 aa, Homo Sapiens
LAAARLAAA

SEQ ID NO: 138491 - protein, 9 aa, Homo Sapiens
LAAMLRGLA

SEQ ID NO: 138492 - protein, 9 aa, Homo Sapiens
LAAPVISVL

SEQ ID NO: 138493 - protein, 9 aa, Homo Sapiens
LADPVFRTL

SEQ ID NO: 138494 - protein, 9 aa, Homo Sapiens
LAFSRALEL

SEQ ID NO: 138495 - protein, 9 aa, Homo Sapiens
LAHAYFAQY

SEQ ID NO: 138496 - protein, 9 aa, Homo Sapiens
LAHEFLQNF

SEQ ID NO: 138497 - protein, 9 aa, Homo Sapiens
LAHLHLIEY

SEQ ID NO: 138498 - protein, 9 aa, Homo Sapiens
LAHSFVTSF

SEQ ID NO: 138499 - protein, 9 aa, Homo Sapiens
LAIEHVRFF

SEQ ID NO: 138500 - protein, 9 aa, Homo Sapiens
LAIPITNTY

SEQ ID NO: 138501 - protein, 9 aa, Homo Sapiens
LAIPQLPSL

SEQ ID NO: 138502 - protein, 9 aa, Homo Sapiens
LAIPVFLTL

SEQ ID NO: 138503 - protein, 9 aa, Homo Sapiens
LAIVPVNTL

SEQ ID NO: 138504 - protein, 9 aa, Homo Sapiens
LAKDFYVAF

SEQ ID NO: 138505 - protein, 9 aa, Homo Sapiens
LAKGWAPTF

SEQ ID NO: 138506 - protein, 9 aa, Homo Sapiens
LAKNFFNEL

SEQ ID NO: 138507 - protein, 9 aa, Homo Sapiens
LALAIAQEL

SEQ ID NO: 138508 - protein, 9 aa, Homo Sapiens
LALAQLSIA

SEQ ID NO: 138509 - protein, 9 aa, Homo Sapiens
LALDHLHSL

SEQ ID NO: 138510 - protein, 9 aa, Homo Sapiens
LALEPGVAY

SEQ ID NO: 138511 - protein, 9 aa, Homo Sapiens
LALFPGVAL

SEQ ID NO: 138512 - protein, 9 aa, Homo Sapiens
LALLRPALP

SEQ ID NO: 138513 - protein, 9 aa, Homo Sapiens
LALSPRLEY

SEQ ID NO: 138514 - protein, 9 aa, Homo Sapiens
LAMEPTPEL

SEQ ID NO: 138515 - protein, 9 aa, Homo Sapiens
LAMKLLKEL

SEQ ID NO: 138516 - protein, 9 aa, Homo Sapiens
LAMRPLASL

SEQ ID NO: 138517 - protein, 9 aa, Homo Sapiens
LANGEVRIY

SEQ ID NO: 138518 - protein, 9 aa, Homo Sapiens
LANGSILVY

SEQ ID NO: 138519 - protein, 9 aa, Homo Sapiens
LANIRSPVF

SEQ ID NO: 138520 - protein, 9 aa, Homo Sapiens
LANPHELSL

SEQ ID NO: 138521 - protein, 9 aa, Homo Sapiens
LAQQYYLVY

SEQ ID NO: 138522 - protein, 9 aa, Homo Sapiens
LAREFLAAM

SEQ ID NO: 138523 - protein, 9 aa, Homo Sapiens
LARFNAHEF

SEQ ID NO: 138524 - protein, 9 aa, Homo Sapiens
LARIIDSEY

SEQ ID NO: 138525 - protein, 9 aa, Homo Sapiens
LARPASAAL

SEQ ID NO: 138526 - protein, 9 aa, Homo Sapiens
LASPESLEL

SEQ ID NO: 138527 - protein, 9 aa, Homo Sapiens
LASPVSPEL

SEQ ID NO: 138528 - protein, 9 aa, Homo Sapiens
LASYVHYVF

SEQ ID NO: 138529 - protein, 9 aa, Homo Sapiens
LATAAALTY

SEQ ID NO: 138530 - protein, 9 aa, Homo Sapiens
LATDFIQSL

SEQ ID NO: 138531 - protein, 9 aa, Homo Sapiens
LATGAAMVL

SEQ ID NO: 138532 - protein, 9 aa, Homo Sapiens
LATRAIPEL

SEQ ID NO: 138533 - protein, 9 aa, Homo Sapiens
LATSHMLEL

SEQ ID NO: 138534 - protein, 9 aa, Homo Sapiens
LATWATKEL

SEQ ID NO: 138535 - protein, 9 aa, Homo Sapiens
LAVDGLMEM

SEQ ID NO: 138536 - protein, 9 aa, Homo Sapiens
LAVENLPSL

SEQ ID NO: 138537 - protein, 9 aa, Homo Sapiens
LAVEPGSNL

SEQ ID NO: 138538 - protein, 9 aa, Homo Sapiens
LAVPDMSSL

SEQ ID NO: 138539 - protein, 9 aa, Homo Sapiens
LAVSVLREI

SEQ ID NO: 138540 - protein, 9 aa, Homo Sapiens
LAWVHATVY

SEQ ID NO: 138541 - protein, 9 aa, Homo Sapiens
LAWVSSQFY

SEQ ID NO: 138542 - protein, 9 aa, Homo Sapiens
LAYIAHPKL

SEQ ID NO: 138543 - protein, 9 aa, Homo Sapiens
LAYIHLIEF

SEQ ID NO: 138544 - protein, 9 aa, Homo Sapiens
LAYLQRIAL

SEQ ID NO: 138545 - protein, 9 aa, Homo Sapiens
LAYTLARVY

SEQ ID NO: 138546 - protein, 9 aa, Homo Sapiens
LGYYHKHAF

SEQ ID NO: 138547 - protein, 9 aa, Homo Sapiens
LIHGDFNEF

SEQ ID NO: 138548 - protein, 9 aa, Homo Sapiens
LIIANTMAF

SEQ ID NO: 138549 - protein, 9 aa, Homo Sapiens
LIREYIVEY

SEQ ID NO: 138550 - protein, 9 aa, Homo Sapiens
LIRPVSASF

SEQ ID NO: 138551 - protein, 9 aa, Homo Sapiens
LIRPWFPEF

SEQ ID NO: 138552 - protein, 9 aa, Homo Sapiens
LIYEHLQQY

SEQ ID NO: 138553 - protein, 9 aa, Homo Sapiens
LLHAFQATF

SEQ ID NO: 138554 - protein, 9 aa, Homo Sapiens
LLHVFSTEF

SEQ ID NO: 138555 - protein, 9 aa, Homo Sapiens
LLNGQRLEL

SEQ ID NO: 138556 - protein, 9 aa, Homo Sapiens
LLRAPGAEL

SEQ ID NO: 138557 - protein, 9 aa, Homo Sapiens
LLRTPGASL

SEQ ID NO: 138558 - protein, 9 aa, Homo Sapiens
LLYIFKQPF

SEQ ID NO: 138559 - protein, 9 aa, Homo Sapiens
LQFPVGRVH

SEQ ID NO: 138560 - protein, 9 aa, Homo Sapiens
LSFPTTKTY

SEQ ID NO: 138561 - protein, 9 aa, Homo Sapiens
LSFTHPISF

SEQ ID NO: 138562 - protein, 9 aa, Homo Sapiens
LSFTHPTSF

SEQ ID NO: 138563 - protein, 9 aa, Homo Sapiens
LSHSLLVTL

SEQ ID NO: 138564 - protein, 9 aa, Homo Sapiens
LSIPRLPSM

SEQ ID NO: 138565 - protein, 9 aa, Homo Sapiens
LSIPYRLIF

SEQ ID NO: 138566 - protein, 9 aa, Homo Sapiens
LSKGPGLEV

SEQ ID NO: 138567 - protein, 9 aa, Homo Sapiens
LSMERMVPA

SEQ ID NO: 138568 - protein, 9 aa, Homo Sapiens
LSSTVTLEH

SEQ ID NO: 138569 - protein, 9 aa, Homo Sapiens
LTHLFKNYF

SEQ ID NO: 138570 - protein, 9 aa, Homo Sapiens
LTHPFFEPF

SEQ ID NO: 138571 - protein, 9 aa, Homo Sapiens
LTTDISLIF

SEQ ID NO: 138572 - protein, 9 aa, Homo Sapiens
LTVEPGASL

SEQ ID NO: 138573 - protein, 9 aa, Homo Sapiens
LVFPFRTFY

SEQ ID NO: 138574 - protein, 9 aa, Homo Sapiens
LVIDKLKEM

SEQ ID NO: 138575 - protein, 9 aa, Homo Sapiens
LVLAPTREL

SEQ ID NO: 138576 - protein, 9 aa, Homo Sapiens
LVNGKSLEL

SEQ ID NO: 138577 - protein, 9 aa, Homo Sapiens
LVREIAQDF

SEQ ID NO: 138578 - protein, 9 aa, Homo Sapiens
MAAMPQTVY

SEQ ID NO: 138579 - protein, 9 aa, Homo Sapiens
MADPNIRFL

SEQ ID NO: 138580 - protein, 9 aa, Homo Sapiens
MAFLYHVAY

SEQ ID NO: 138581 - protein, 9 aa, Homo Sapiens
MAHSFGESY

SEQ ID NO: 138582 - protein, 9 aa, Homo Sapiens
MALAVRVVY

SEQ ID NO: 138583 - protein, 9 aa, Homo Sapiens
MALLFLLPL

SEQ ID NO: 138584 - protein, 9 aa, Homo Sapiens
MANGAVIHL

SEQ ID NO: 138585 - protein, 9 aa, Homo Sapiens
MANPTALLL

SEQ ID NO: 138586 - protein, 9 aa, Homo Sapiens
MAPLKMLAL

SEQ ID NO: 138587 - protein, 9 aa, Homo Sapiens
MATVVYKVF

SEQ ID NO: 138588 - protein, 9 aa, Homo Sapiens
MAVEFLHEL

SEQ ID NO: 138589 - protein, 9 aa, Homo Sapiens
MAYVSGLSF

SEQ ID NO: 138590 - protein, 9 aa, Homo Sapiens
MIIEPTSPC

SEQ ID NO: 138591 - protein, 9 aa, Homo Sapiens
MSVQPTVSL

SEQ ID NO: 138592 - protein, 9 aa, Homo Sapiens
MVADKFTEL

SEQ ID NO: 138593 - protein, 9 aa, Homo Sapiens
NAFDVFAAY

SEQ ID NO: 138594 - protein, 9 aa, Homo Sapiens
NAHEFITSF

SEQ ID NO: 138595 - protein, 9 aa, Homo Sapiens
NAIEGLTEY

SEQ ID NO: 138596 - protein, 9 aa, Homo Sapiens
NAIIFRESF

SEQ ID NO: 138597 - protein, 9 aa, Homo Sapiens
NALPALLIY

SEQ ID NO: 138598 - protein, 9 aa, Homo Sapiens
NAMDVVVQF

SEQ ID NO: 138599 - protein, 9 aa, Homo Sapiens
NAVAALSEI

SEQ ID NO: 138600 - protein, 9 aa, Homo Sapiens
NGFGGFGSY

SEQ ID NO: 138601 - protein, 9 aa, Homo Sapiens
NIREIEIDY

SEQ ID NO: 138602 - protein, 9 aa, Homo Sapiens
NVYDFKTTY

SEQ ID NO: 138603 - protein, 9 aa, Homo Sapiens
PIRLLAAAA

SEQ ID NO: 138604 - protein, 9 aa, Homo Sapiens
QAFEFSEAF

SEQ ID NO: 138605 - protein, 9 aa, Homo Sapiens
QATPVPLEF

SEQ ID NO: 138606 - protein, 9 aa, Homo Sapiens
QAVAIFTVY

SEQ ID NO: 138607 - protein, 9 aa, Homo Sapiens
QIAEFKEAF

SEQ ID NO: 138608 - protein, 9 aa, Homo Sapiens
QQNPQPLIF

SEQ ID NO: 138609 - protein, 9 aa, Homo Sapiens
RAAPFSLEY

SEQ ID NO: 138610 - protein, 9 aa, Homo Sapiens
RAINIALQL

SEQ ID NO: 138611 - protein, 9 aa, Homo Sapiens
RAIQFYLEF

SEQ ID NO: 138612 - protein, 9 aa, Homo Sapiens
RALDHYLTL

SEQ ID NO: 138613 - protein, 9 aa, Homo Sapiens
RGYDFPAVL

SEQ ID NO: 138614 - protein, 9 aa, Homo Sapiens
RIADLISSF

SEQ ID NO: 138615 - protein, 9 aa, Homo Sapiens
RIIEETLAL

SEQ ID NO: 138616 - protein, 9 aa, Homo Sapiens
RIVDALNEF

SEQ ID NO: 138617 - protein, 9 aa, Homo Sapiens
RSFPGFQAF

SEQ ID NO: 138618 - protein, 9 aa, Homo Sapiens
SAADFFSHY

SEQ ID NO: 138619 - protein, 9 aa, Homo Sapiens
SAAFPGASL

SEQ ID NO: 138620 - protein, 9 aa, Homo Sapiens
SAAQPGVAF

SEQ ID NO: 138621 - protein, 9 aa, Homo Sapiens
SAFDHFASV

SEQ ID NO: 138622 - protein, 9 aa, Homo Sapiens
SAFGYFITA

SEQ ID NO: 138623 - protein, 9 aa, Homo Sapiens
SAFSGFPSF

SEQ ID NO: 138624 - protein, 9 aa, Homo Sapiens
SAHLAFMTF

SEQ ID NO: 138625 - protein, 9 aa, Homo Sapiens
SAHLFEVEL

SEQ ID NO: 138626 - protein, 9 aa, Homo Sapiens
SAIGYIHSL

SEQ ID NO: 138627 - protein, 9 aa, Homo Sapiens
SAIHVLASL

SEQ ID NO: 138628 - protein, 9 aa, Homo Sapiens
SAINELMQM

SEQ ID NO: 138629 - protein, 9 aa, Homo Sapiens
SAIPHPLIM

SEQ ID NO: 138630 - protein, 9 aa, Homo Sapiens
SALEKFFYF

SEQ ID NO: 138631 - protein, 9 aa, Homo Sapiens
SALFFGNAF

SEQ ID NO: 138632 - protein, 9 aa, Homo Sapiens
SAMPTVRSF

SEQ ID NO: 138633 - protein, 9 aa, Homo Sapiens
SANDIYLIF

SEQ ID NO: 138634 - protein, 9 aa, Homo Sapiens
SANIRLTAM

SEQ ID NO: 138635 - protein, 9 aa, Homo Sapiens
SANNVYLVM

SEQ ID NO: 138636 - protein, 9 aa, Homo Sapiens
SAPIFTTSL

SEQ ID NO: 138637 - protein, 9 aa, Homo Sapiens
SAVSIFHEL

SEQ ID NO: 138638 - protein, 9 aa, Homo Sapiens
SAWSFITTF

SEQ ID NO: 138639 - protein, 9 aa, Homo Sapiens
SAYAGFLAL

SEQ ID NO: 138640 - protein, 9 aa, Homo Sapiens
SAYNAFNRF

SEQ ID NO: 138641 - protein, 9 aa, Homo Sapiens
SAYVKKIQF

SEQ ID NO: 138642 - protein, 9 aa, Homo Sapiens
SGIERMGPL

SEQ ID NO: 138643 - protein, 9 aa, Homo Sapiens
SIFDDFAHY

SEQ ID NO: 138644 - protein, 9 aa, Homo Sapiens
SIFDDFSHY

SEQ ID NO: 138645 - protein, 9 aa, Homo Sapiens
SIFDGFRDF

SEQ ID NO: 138646 - protein, 9 aa, Homo Sapiens
SIFDSFPTY

SEQ ID NO: 138647 - protein, 9 aa, Homo Sapiens
SIIEYLPTL

SEQ ID NO: 138648 - protein, 9 aa, Homo Sapiens
SIIGRLLEV

SEQ ID NO: 138649 - protein, 9 aa, Homo Sapiens
SIIKKLAAL

SEQ ID NO: 138650 - protein, 9 aa, Homo Sapiens
SIIQRLLEV

SEQ ID NO: 138651 - protein, 9 aa, Homo Sapiens
SIKDYFLEF

SEQ ID NO: 138652 - protein, 9 aa, Homo Sapiens
SILEKTSAY

SEQ ID NO: 138653 - protein, 9 aa, Homo Sapiens
SILGNLKDM

SEQ ID NO: 138654 - protein, 9 aa, Homo Sapiens
SIMDEFQEY

SEQ ID NO: 138655 - protein, 9 aa, Homo Sapiens
SIQVPGMQM

SEQ ID NO: 138656 - protein, 9 aa, Homo Sapiens
SIREAGGAF

SEQ ID NO: 138657 - protein, 9 aa, Homo Sapiens
SIVENIRIY

SEQ ID NO: 138658 - protein, 9 aa, Homo Sapiens
SIYATLAIH

SEQ ID NO: 138659 - protein, 9 aa, Homo Sapiens
SIYWTAVTY

SEQ ID NO: 138660 - protein, 9 aa, Homo Sapiens
SLIEQTTAL

SEQ ID NO: 138661 - protein, 9 aa, Homo Sapiens
SNYHFGVTY

SEQ ID NO: 138662 - protein, 9 aa, Homo Sapiens
SSFGDFVAL

SEQ ID NO: 138663 - protein, 9 aa, Homo Sapiens
SSVPGVRLL

SEQ ID NO: 138664 - protein, 9 aa, Homo Sapiens
STFFPFHEY

SEQ ID NO: 138665 - protein, 9 aa, Homo Sapiens
SVAGKLSVF

SEQ ID NO: 138666 - protein, 9 aa, Homo Sapiens
SVPAFASSL

SEQ ID NO: 138667 - protein, 9 aa, Homo Sapiens
SVVAVPLPL

SEQ ID NO: 138668 - protein, 9 aa, Homo Sapiens
TAAFLIPLL

SEQ ID NO: 138669 - protein, 9 aa, Homo Sapiens
TAAPTIGVL

SEQ ID NO: 138670 - protein, 9 aa, Homo Sapiens
TAAVFKETF

SEQ ID NO: 138671 - protein, 9 aa, Homo Sapiens
TAFFFAGYY

SEQ ID NO: 138672 - protein, 9 aa, Homo Sapiens
TAFGGFLKY

SEQ ID NO: 138673 - protein, 9 aa, Homo Sapiens
TAISLFYEL

SEQ ID NO: 138674 - protein, 9 aa, Homo Sapiens
TALPTRIAY

SEQ ID NO: 138675 - protein, 9 aa, Homo Sapiens
TAMPKLLSY

SEQ ID NO: 138676 - protein, 9 aa, Homo Sapiens
TARPPGYEF

SEQ ID NO: 138677 - protein, 9 aa, Homo Sapiens
TARYIYISY

SEQ ID NO: 138678 - protein, 9 aa, Homo Sapiens
TAYDNFVEL

SEQ ID NO: 138679 - protein, 9 aa, Homo Sapiens
TIIPKVLAM

SEQ ID NO: 138680 - protein, 9 aa, Homo Sapiens
TILGGLNEF

SEQ ID NO: 138681 - protein, 9 aa, Homo Sapiens
TSFKHFIFF

SEQ ID NO: 138682 - protein, 9 aa, Homo Sapiens
TSPEAFLAL

SEQ ID NO: 138683 - protein, 9 aa, Homo Sapiens
TSSPSILTL

SEQ ID NO: 138684 - protein, 9 aa, Homo Sapiens
TVPVRLSSL

SEQ ID NO: 138685 - protein, 9 aa, Homo Sapiens
TVQPHFLEF

SEQ ID NO: 138686 - protein, 9 aa, Homo Sapiens
VAAPLLSAY

SEQ ID NO: 138687 - protein, 9 aa, Homo Sapiens
VAAPQLPVL

SEQ ID NO: 138688 - protein, 9 aa, Homo Sapiens
VAFGSHMSF

SEQ ID NO: 138689 - protein, 9 aa, Homo Sapiens
VAFPSSSVY

SEQ ID NO: 138690 - protein, 9 aa, Homo Sapiens
VAGPNIAAI

SEQ ID NO: 138691 - protein, 9 aa, Homo Sapiens
VAIAGLMEV

SEQ ID NO: 138692 - protein, 9 aa, Homo Sapiens
VAINRLLSM

SEQ ID NO: 138693 - protein, 9 aa, Homo Sapiens
VAIPVSIFY

SEQ ID NO: 138694 - protein, 9 aa, Homo Sapiens
VAKWATVTF

SEQ ID NO: 138695 - protein, 9 aa, Homo Sapiens
VALDFEQEM

SEQ ID NO: 138696 - protein, 9 aa, Homo Sapiens
VALLRVTPF

SEQ ID NO: 138697 - protein, 9 aa, Homo Sapiens
VALPMVLVL

SEQ ID NO: 138698 - protein, 9 aa, Homo Sapiens
VALPPGLAV

SEQ ID NO: 138699 - protein, 9 aa, Homo Sapiens
VALPVFLVI

SEQ ID NO: 138700 - protein, 9 aa, Homo Sapiens
VAMIYPLEY

SEQ ID NO: 138701 - protein, 9 aa, Homo Sapiens
VANPAFLKY

SEQ ID NO: 138702 - protein, 9 aa, Homo Sapiens
VANPNSAIF

SEQ ID NO: 138703 - protein, 9 aa, Homo Sapiens
VANVFLEAY

SEQ ID NO: 138704 - protein, 9 aa, Homo Sapiens
VAPLPRSAL

SEQ ID NO: 138705 - protein, 9 aa, Homo Sapiens
VAPVAQVAL

SEQ ID NO: 138706 - protein, 9 aa, Homo Sapiens
VARPDVVEM

SEQ ID NO: 138707 - protein, 9 aa, Homo Sapiens
VARPLSTAL

SEQ ID NO: 138708 - protein, 9 aa, Homo Sapiens
VARPVFTEY

SEQ ID NO: 138709 - protein, 9 aa, Homo Sapiens
VAVDGLNQL

SEQ ID NO: 138710 - protein, 9 aa, Homo Sapiens
VAVHVFSEF

SEQ ID NO: 138711 - protein, 9 aa, Homo Sapiens
VAVPVAVTF

SEQ ID NO: 138712 - protein, 9 aa, Homo Sapiens
VAVSMLNVY

SEQ ID NO: 138713 - protein, 9 aa, Homo Sapiens
VAYMNPIAM

SEQ ID NO: 138714 - protein, 9 aa, Homo Sapiens
VAYPCAILY

SEQ ID NO: 138715 - protein, 9 aa, Homo Sapiens
VAYVSSVAL

SEQ ID NO: 138716 - protein, 9 aa, Homo Sapiens
VAYWRQAGL

SEQ ID NO: 138717 - protein, 9 aa, Homo Sapiens
VEKTAIFAF

SEQ ID NO: 138718 - protein, 9 aa, Homo Sapiens
VIFEGFFAH

SEQ ID NO: 138719 - protein, 9 aa, Homo Sapiens
VILPPLSPY

SEQ ID NO: 138720 - protein, 9 aa, Homo Sapiens
VIRDFAGPY

SEQ ID NO: 138721 - protein, 9 aa, Homo Sapiens
VNNPHFLIM

SEQ ID NO: 138722 - protein, 9 aa, Homo Sapiens
VSAGIQTSF

SEQ ID NO: 138723 - protein, 9 aa, Homo Sapiens
VSFHFSNYF

SEQ ID NO: 138724 - protein, 9 aa, Homo Sapiens
VSHFFSLPF

SEQ ID NO: 138725 - protein, 9 aa, Homo Sapiens
VSSFVFLRF

SEQ ID NO: 138726 - protein, 9 aa, Homo Sapiens
VSYEFKFPF

SEQ ID NO: 138727 - protein, 9 aa, Homo Sapiens
VTRPTGVSF

SEQ ID NO: 138728 - protein, 9 aa, Homo Sapiens
VTVPPGPSL

SEQ ID NO: 138729 - protein, 9 aa, Homo Sapiens
VTVRPGLAM

SEQ ID NO: 138730 - protein, 9 aa, Homo Sapiens
VTYSFRQSF

SEQ ID NO: 138731 - protein, 9 aa, Homo Sapiens
VTYVPVTTF

SEQ ID NO: 138732 - protein, 9 aa, Homo Sapiens
VVFFNKRVY

SEQ ID NO: 138733 - protein, 9 aa, Homo Sapiens
VVKMPSGEF

SEQ ID NO: 138734 - protein, 9 aa, Homo Sapiens
VVKPPGSSL

SEQ ID NO: 138735 - protein, 9 aa, Homo Sapiens
VVNGRVLEL

SEQ ID NO: 138736 - protein, 9 aa, Homo Sapiens
VVPDQLMAF

SEQ ID NO: 138737 - protein, 9 aa, Homo Sapiens
VVPTAILAF

SEQ ID NO: 138738 - protein, 9 aa, Homo Sapiens
VVVDPIQSV

SEQ ID NO: 138739 - protein, 9 aa, Homo Sapiens
VVYPWTQRF

SEQ ID NO: 138740 - protein, 9 aa, Homo Sapiens
WAMEQVLEF

SEQ ID NO: 138741 - protein, 9 aa, Homo Sapiens
WARPLSVSF

SEQ ID NO: 138742 - protein, 9 aa, Homo Sapiens
WGVPIEKIY

SEQ ID NO: 138743 - protein, 9 aa, Homo Sapiens
WQNPHMLFL

SEQ ID NO: 138744 - protein, 9 aa, Homo Sapiens
WSLPATATM

SEQ ID NO: 138745 - protein, 9 aa, Homo Sapiens
YAAGAKLVL

SEQ ID NO: 138746 - protein, 9 aa, Homo Sapiens
YAALHGEFY

SEQ ID NO: 138747 - protein, 9 aa, Homo Sapiens
YAALNLAAL

SEQ ID NO: 138748 - protein, 9 aa, Homo Sapiens
YAANPGQLF

SEQ ID NO: 138749 - protein, 9 aa, Homo Sapiens
YAAPHFFHL

SEQ ID NO: 138750 - protein, 9 aa, Homo Sapiens
YAAPPHVIH

SEQ ID NO: 138751 - protein, 9 aa, Homo Sapiens
YAAPQLRSI

SEQ ID NO: 138752 - protein, 9 aa, Homo Sapiens
YAAPWFLTL

SEQ ID NO: 138753 - protein, 9 aa, Homo Sapiens
YAAQNLLSH

SEQ ID NO: 138754 - protein, 9 aa, Homo Sapiens
YAAQQLPSL

SEQ ID NO: 138755 - protein, 9 aa, Homo Sapiens
YAAYPLTEV

SEQ ID NO: 138756 - protein, 9 aa, Homo Sapiens
YAFDFARQS

SEQ ID NO: 138757 - protein, 9 aa, Homo Sapiens
YAFGGGCEL

SEQ ID NO: 138758 - protein, 9 aa, Homo Sapiens
YAFIEFASF

SEQ ID NO: 138759 - protein, 9 aa, Homo Sapiens
YAFKFFDTY

SEQ ID NO: 138760 - protein, 9 aa, Homo Sapiens
YAFNMKATV

SEQ ID NO: 138761 - protein, 9 aa, Homo Sapiens
YAFPKAVSV

SEQ ID NO: 138762 - protein, 9 aa, Homo Sapiens
YAFPKSITV

SEQ ID NO: 138763 - protein, 9 aa, Homo Sapiens
YAFQFVGAY

SEQ ID NO: 138764 - protein, 9 aa, Homo Sapiens
YAFVRPVIL

SEQ ID NO: 138765 - protein, 9 aa, Homo Sapiens
YAGYIPQAF

SEQ ID NO: 138766 - protein, 9 aa, Homo Sapiens
YAHIYHQHF

SEQ ID NO: 138767 - protein, 9 aa, Homo Sapiens
YAIDNPLHY

SEQ ID NO: 138768 - protein, 9 aa, Homo Sapiens
YAIDSVLEV

SEQ ID NO: 138769 - protein, 9 aa, Homo Sapiens
YAIESQLQL

SEQ ID NO: 138770 - protein, 9 aa, Homo Sapiens
YAIEVDPVL

SEQ ID NO: 138771 - protein, 9 aa, Homo Sapiens
YAIFRILLY

SEQ ID NO: 138772 - protein, 9 aa, Homo Sapiens
YAIGLVMRL

SEQ ID NO: 138773 - protein, 9 aa, Homo Sapiens
YAIGVSHPL

SEQ ID NO: 138774 - protein, 9 aa, Homo Sapiens
YAISAGVSL

SEQ ID NO: 138775 - protein, 9 aa, Homo Sapiens
YAISKPDIL

SEQ ID NO: 138776 - protein, 9 aa, Homo Sapiens
YAISKPEVL

SEQ ID NO: 138777 - protein, 9 aa, Homo Sapiens
YAISPGLDI

SEQ ID NO: 138778 - protein, 9 aa, Homo Sapiens
YAITTLHNL

SEQ ID NO: 138779 - protein, 9 aa, Homo Sapiens
YAIVRFNQY

SEQ ID NO: 138780 - protein, 9 aa, Homo Sapiens
YAKDDPLEF

SEQ ID NO: 138781 - protein, 9 aa, Homo Sapiens
YAKIVEIPF

SEQ ID NO: 138782 - protein, 9 aa, Homo Sapiens
YAKRPGIGL

SEQ ID NO: 138783 - protein, 9 aa, Homo Sapiens
YALELLTVY

SEQ ID NO: 138784 - protein, 9 aa, Homo Sapiens
YALNHTLSV

SEQ ID NO: 138785 - protein, 9 aa, Homo Sapiens
YALTAIMKL

SEQ ID NO: 138786 - protein, 9 aa, Homo Sapiens
YAMDELRSL

SEQ ID NO: 138787 - protein, 9 aa, Homo Sapiens
YAMPSSTPL

SEQ ID NO: 138788 - protein, 9 aa, Homo Sapiens
YANDVTRVL

SEQ ID NO: 138789 - protein, 9 aa, Homo Sapiens
YANEVGEAF

SEQ ID NO: 138790 - protein, 9 aa, Homo Sapiens
YAQIRTIAI

SEQ ID NO: 138791 - protein, 9 aa, Homo Sapiens
YAQLHSFTL

SEQ ID NO: 138792 - protein, 9 aa, Homo Sapiens
YAQLHSLTL

SEQ ID NO: 138793 - protein, 9 aa, Homo Sapiens
YARAKFLDY

SEQ ID NO: 138794 - protein, 9 aa, Homo Sapiens
YARDETEFY

SEQ ID NO: 138795 - protein, 9 aa, Homo Sapiens
YARLHPRAV

SEQ ID NO: 138796 - protein, 9 aa, Homo Sapiens
YASSPGMSL

SEQ ID NO: 138797 - protein, 9 aa, Homo Sapiens
YAVNSQFTM

SEQ ID NO: 138798 - protein, 9 aa, Homo Sapiens
YAVPALEAH

SEQ ID NO: 138799 - protein, 9 aa, Homo Sapiens
YAVSELAGH

SEQ ID NO: 138800 - protein, 9 aa, Homo Sapiens
YAYATVLTF

SEQ ID NO: 138801 - protein, 9 aa, Homo Sapiens
YAYFNFPEL

SEQ ID NO: 138802 - protein, 9 aa, Homo Sapiens
YAYKDFLWF

SEQ ID NO: 138803 - protein, 9 aa, Homo Sapiens
YAYPGVLLI

SEQ ID NO: 138804 - protein, 9 aa, Homo Sapiens
YAYPYSYYY

SEQ ID NO: 138805 - protein, 9 aa, Homo Sapiens
YAYTGRLEL

SEQ ID NO: 138806 - protein, 9 aa, Homo Sapiens
YFFTWDTEY

SEQ ID NO: 138807 - protein, 9 aa, Homo Sapiens
YFWPRTVPM

SEQ ID NO: 138808 - protein, 9 aa, Homo Sapiens
YFYVIGSSY

SEQ ID NO: 138809 - protein, 9 aa, Homo Sapiens
YGIEHALAL

SEQ ID NO: 138810 - protein, 9 aa, Homo Sapiens
YGIPFYLQY

SEQ ID NO: 138811 - protein, 9 aa, Homo Sapiens
YGSPGILEF

SEQ ID NO: 138812 - protein, 9 aa, Homo Sapiens
YGSPNALVL

SEQ ID NO: 138813 - protein, 9 aa, Homo Sapiens
YIIGVFRKF

SEQ ID NO: 138814 - protein, 9 aa, Homo Sapiens
YIISGLTGF

SEQ ID NO: 138815 - protein, 9 aa, Homo Sapiens
YILDQTNVY

SEQ ID NO: 138816 - protein, 9 aa, Homo Sapiens
YILGKFFAL

SEQ ID NO: 138817 - protein, 9 aa, Homo Sapiens
YIMAPGLLH

SEQ ID NO: 138818 - protein, 9 aa, Homo Sapiens
YIMDWMDEM

SEQ ID NO: 138819 - protein, 9 aa, Homo Sapiens
YIPHGYMEL

SEQ ID NO: 138820 - protein, 9 aa, Homo Sapiens
YIQEHLLQI

SEQ ID NO: 138821 - protein, 9 aa, Homo Sapiens
YIRDLALEY

SEQ ID NO: 138822 - protein, 9 aa, Homo Sapiens
YIYPKHLKY

SEQ ID NO: 138823 - protein, 9 aa, Homo Sapiens
YLLDHFLSM

SEQ ID NO: 138824 - protein, 9 aa, Homo Sapiens
YLLPDTKAY

SEQ ID NO: 138825 - protein, 9 aa, Homo Sapiens
YLLPHILVY

SEQ ID NO: 138826 - protein, 9 aa, Homo Sapiens
YLNDAFLEF

SEQ ID NO: 138827 - protein, 9 aa, Homo Sapiens
YLRPPNTSL

SEQ ID NO: 138828 - protein, 9 aa, Homo Sapiens
YNMPYPPVY

SEQ ID NO: 138829 - protein, 9 aa, Homo Sapiens
YQIAVTKVL

SEQ ID NO: 138830 - protein, 9 aa, Homo Sapiens
YQQELEREL

SEQ ID NO: 138831 - protein, 9 aa, Homo Sapiens
YSAPVIHVL

SEQ ID NO: 138832 - protein, 9 aa, Homo Sapiens
YSFDYPSDM

SEQ ID NO: 138833 - protein, 9 aa, Homo Sapiens
YSFHKFHYL

SEQ ID NO: 138834 - protein, 9 aa, Homo Sapiens
YSGSPTSYF

SEQ ID NO: 138835 - protein, 9 aa, Homo Sapiens
YSIVGLSSL

SEQ ID NO: 138836 - protein, 9 aa, Homo Sapiens
YSKLPGVSL

SEQ ID NO: 138837 - protein, 9 aa, Homo Sapiens
YSLDHISSL

SEQ ID NO: 138838 - protein, 9 aa, Homo Sapiens
YSLPNAPTL

SEQ ID NO: 138839 - protein, 9 aa, Homo Sapiens
YSMDENLEF

SEQ ID NO: 138840 - protein, 9 aa, Homo Sapiens
YSMPISIEF

SEQ ID NO: 138841 - protein, 9 aa, Homo Sapiens
YSMPSTHAM

SEQ ID NO: 138842 - protein, 9 aa, Homo Sapiens
YSSSRTLLF

SEQ ID NO: 138843 - protein, 9 aa, Homo Sapiens
YSVDRLYEL

SEQ ID NO: 138844 - protein, 9 aa, Homo Sapiens
YSVYVYKVL

SEQ ID NO: 138845 - protein, 9 aa, Homo Sapiens
YSYFHFVFF

SEQ ID NO: 138846 - protein, 9 aa, Homo Sapiens
YSYFSPRTM

SEQ ID NO: 138847 - protein, 9 aa, Homo Sapiens
YTFEDRINF

SEQ ID NO: 138848 - protein, 9 aa, Homo Sapiens
YTLINHRVL

SEQ ID NO: 138849 - protein, 9 aa, Homo Sapiens
YTMPNFRQY

SEQ ID NO: 138850 - protein, 9 aa, Homo Sapiens
YTTDFIYQL

SEQ ID NO: 138851 - protein, 9 aa, Homo Sapiens
YTVTDLVEY

SEQ ID NO: 138852 - protein, 9 aa, Homo Sapiens
YTYLRINFY

SEQ ID NO: 138853 - protein, 9 aa, Homo Sapiens
YVIQHVLEH

SEQ ID NO: 138854 - protein, 9 aa, Homo Sapiens
YVIQKFFEF

SEQ ID NO: 138855 - protein, 9 aa, Homo Sapiens
YVNLPTIAL

SEQ ID NO: 138856 - protein, 9 aa, Homo Sapiens
YVTTSTRTY

SEQ ID NO: 138857 - protein, 9 aa, Homo Sapiens
YVYPKYLKY

SEQ ID NO: 138858 - protein, 9 aa, Homo Sapiens
YVYSHFLQF

SEQ ID NO: 138859 - protein, 10 aa, Homo Sapiens
AAINPELLQL

SEQ ID NO: 138860 - protein, 10 aa, Homo Sapiens
ALIEFIRSEY

SEQ ID NO: 138861 - protein, 10 aa, Homo Sapiens
ALPEDDFLSL

SEQ ID NO: 138862 - protein, 10 aa, Homo Sapiens
FAANFGAIGF

SEQ ID NO: 138863 - protein, 10 aa, Homo Sapiens
FADPHGKRVF

SEQ ID NO: 138864 - protein, 10 aa, Homo Sapiens
FADPHSKRVF

SEQ ID NO: 138865 - protein, 10 aa, Homo Sapiens
FAESGWRSAL

SEQ ID NO: 138866 - protein, 10 aa, Homo Sapiens
FAFESDLHSL

SEQ ID NO: 138867 - protein, 10 aa, Homo Sapiens
FAIGGIARTY

SEQ ID NO: 138868 - protein, 10 aa, Homo Sapiens
FAKTFVGTPY

SEQ ID NO: 138869 - protein, 10 aa, Homo Sapiens
FALDGLKQVM

SEQ ID NO: 138870 - protein, 10 aa, Homo Sapiens
FALGLPFLVL

SEQ ID NO: 138871 - protein, 10 aa, Homo Sapiens
FALTIHTQVF

SEQ ID NO: 138872 - protein, 10 aa, Homo Sapiens
FALTNGIYPH

SEQ ID NO: 138873 - protein, 10 aa, Homo Sapiens
FAMMHGGTGF

SEQ ID NO: 138874 - protein, 10 aa, Homo Sapiens
FAMTGERVDL

SEQ ID NO: 138875 - protein, 10 aa, Homo Sapiens
FAVDLEHHSY

SEQ ID NO: 138876 - protein, 10 aa, Homo Sapiens
FAVDPQITSL

SEQ ID NO: 138877 - protein, 10 aa, Homo Sapiens
FAVDPRFLAY

SEQ ID NO: 138878 - protein, 10 aa, Homo Sapiens
FAVNPLLRVI

SEQ ID NO: 138879 - protein, 10 aa, Homo Sapiens
FAYDPSNYEY

SEQ ID NO: 138880 - protein, 10 aa, Homo Sapiens
FAYGGHPYPF

SEQ ID NO: 138881 - protein, 10 aa, Homo Sapiens
FAYGQNKTAF

SEQ ID NO: 138882 - protein, 10 aa, Homo Sapiens
FAYGTYRSNF

SEQ ID NO: 138883 - protein, 10 aa, Homo Sapiens
FFIPSGLAVF

SEQ ID NO: 138884 - protein, 10 aa, Homo Sapiens
FIMEGGAMVL

SEQ ID NO: 138885 - protein, 10 aa, Homo Sapiens
FLLPTGLSSL

SEQ ID NO: 138886 - protein, 10 aa, Homo Sapiens
FLPARFYQAL

SEQ ID NO: 138887 - protein, 10 aa, Homo Sapiens
FLPEEAWCDL

SEQ ID NO: 138888 - protein, 10 aa, Homo Sapiens
FLPEVPLGQL

SEQ ID NO: 138889 - protein, 10 aa, Homo Sapiens
FLPTRALAAL

SEQ ID NO: 138890 - protein, 10 aa, Homo Sapiens
FLVNHDFSPL

SEQ ID NO: 138891 - protein, 10 aa, Homo Sapiens
FLYPFPLALF

SEQ ID NO: 138892 - protein, 10 aa, Homo Sapiens
FQLPGGHLEF

SEQ ID NO: 138893 - protein, 10 aa, Homo Sapiens
FSFGGKLVTF

SEQ ID NO: 138894 - protein, 10 aa, Homo Sapiens
FSKDWDVTEY

SEQ ID NO: 138895 - protein, 10 aa, Homo Sapiens
FSYPFTFEAF

SEQ ID NO: 138896 - protein, 10 aa, Homo Sapiens
FTMGGPAISM

SEQ ID NO: 138897 - protein, 10 aa, Homo Sapiens
FTPFVDPRVY

SEQ ID NO: 138898 - protein, 10 aa, Homo Sapiens
FVAPVDLQAY

SEQ ID NO: 138899 - protein, 10 aa, Homo Sapiens
FVNDTLRSEF

SEQ ID NO: 138900 - protein, 10 aa, Homo Sapiens
FVSAGIQTSF

SEQ ID NO: 138901 - protein, 10 aa, Homo Sapiens
GAIGGTPPAF

SEQ ID NO: 138902 - protein, 10 aa, Homo Sapiens
GAYVHMVTHF

SEQ ID NO: 138903 - protein, 10 aa, Homo Sapiens
GGYDGYRPSF

SEQ ID NO: 138904 - protein, 10 aa, Homo Sapiens
HIPDHLRPEY

SEQ ID NO: 138905 - protein, 10 aa, Homo Sapiens
IAYIHLVADY

SEQ ID NO: 138906 - protein, 10 aa, Homo Sapiens
ISIEGNKMPL

SEQ ID NO: 138907 - protein, 10 aa, Homo Sapiens
KLPNFGFVVF

SEQ ID NO: 138908 - protein, 10 aa, Homo Sapiens
LAADLSLHSF

SEQ ID NO: 138909 - protein, 10 aa, Homo Sapiens
LAINGSNLPR

SEQ ID NO: 138910 - protein, 10 aa, Homo Sapiens
LASPVPTTPF

SEQ ID NO: 138911 - protein, 10 aa, Homo Sapiens
LAVHPSGVAL

SEQ ID NO: 138912 - protein, 10 aa, Homo Sapiens
LQPPKPLSSL

SEQ ID NO: 138913 - protein, 10 aa, Homo Sapiens
LTMPDTPRLF

SEQ ID NO: 138914 - protein, 10 aa, Homo Sapiens
LVKNWVPTAY

SEQ ID NO: 138915 - protein, 10 aa, Homo Sapiens
MAYGASFLSF

SEQ ID NO: 138916 - protein, 10 aa, Homo Sapiens
PEVKFNWYVD

SEQ ID NO: 138917 - protein, 10 aa, Homo Sapiens
RIPEFNMAAF

SEQ ID NO: 138918 - protein, 10 aa, Homo Sapiens
RLPDTALPTL

SEQ ID NO: 138919 - protein, 10 aa, Homo Sapiens
SLPALPLAEL

SEQ ID NO: 138920 - protein, 10 aa, Homo Sapiens
TPIVGQPSIP

SEQ ID NO: 138921 - protein, 10 aa, Homo Sapiens
TQKSLSLSPG

SEQ ID NO: 138922 - protein, 10 aa, Homo Sapiens
VAFLAMLLVL

SEQ ID NO: 138923 - protein, 10 aa, Homo Sapiens
VALPFQLTPF

SEQ ID NO: 138924 - protein, 10 aa, Homo Sapiens
VAMNPTNTVF

SEQ ID NO: 138925 - protein, 10 aa, Homo Sapiens
VARNPPGFAF

SEQ ID NO: 138926 - protein, 10 aa, Homo Sapiens
VAYHQLFQEY

SEQ ID NO: 138927 - protein, 10 aa, Homo Sapiens
VLPHQPLATY

SEQ ID NO: 138928 - protein, 10 aa, Homo Sapiens
VVYPWTQRFF

SEQ ID NO: 138929 - protein, 10 aa, Homo Sapiens
YAAELAGLSY

SEQ ID NO: 138930 - protein, 10 aa, Homo Sapiens
YAAPHPLQSY

SEQ ID NO: 138931 - protein, 10 aa, Homo Sapiens
YAAPPHVIHH

SEQ ID NO: 138932 - protein, 10 aa, Homo Sapiens
YADPNFVRTF

SEQ ID NO: 138933 - protein, 10 aa, Homo Sapiens
YADPTKRLEL

SEQ ID NO: 138934 - protein, 10 aa, Homo Sapiens
YAFPKAVSVF

SEQ ID NO: 138935 - protein, 10 aa, Homo Sapiens
YALCGFGGVL

SEQ ID NO: 138936 - protein, 10 aa, Homo Sapiens
YALDVRVNSL

SEQ ID NO: 138937 - protein, 10 aa, Homo Sapiens
YALNENVSSF

SEQ ID NO: 138938 - protein, 10 aa, Homo Sapiens
YAPPRDFAAY

SEQ ID NO: 138939 - protein, 10 aa, Homo Sapiens
YAVEGRDLTL

SEQ ID NO: 138940 - protein, 10 aa, Homo Sapiens
YINPAKLTPY

SEQ ID NO: 138941 - protein, 10 aa, Homo Sapiens
YLPIGGLAEF

SEQ ID NO: 138942 - protein, 10 aa, Homo Sapiens
YLPNQLFRTF

SEQ ID NO: 138943 - protein, 10 aa, Homo Sapiens
YLRPGQAAAF

SEQ ID NO: 138944 - protein, 10 aa, Homo Sapiens
YMIDPSGVSY

SEQ ID NO: 138945 - protein, 10 aa, Homo Sapiens
YMNPYQLNAY

SEQ ID NO: 138946 - protein, 10 aa, Homo Sapiens
YTNGSFGSNF

SEQ ID NO: 138947 - protein, 10 aa, Homo Sapiens
YVIEPHSMEF

SEQ ID NO: 138948 - protein, 10 aa, Homo Sapiens
YVIPHPVHAF

SEQ ID NO: 138949 - protein, 10 aa, Homo Sapiens
YVNGKTFLEK

SEQ ID NO: 138950 - protein, 11 aa, Homo Sapiens
AAYYPSDVSSL

SEQ ID NO: 138951 - protein, 11 aa, Homo Sapiens
AVAEALTNLVF

SEQ ID NO: 138952 - protein, 11 aa, Homo Sapiens
AVRDISEASVF

SEQ ID NO: 138953 - protein, 11 aa, Homo Sapiens
FAAAVLDGMIY

SEQ ID NO: 138954 - protein, 11 aa, Homo Sapiens
FAFEGIGDEDL

SEQ ID NO: 138955 - protein, 11 aa, Homo Sapiens
FAHFPGLASEL

SEQ ID NO: 138956 - protein, 11 aa, Homo Sapiens
FAKPVYPGQTL

SEQ ID NO: 138957 - protein, 11 aa, Homo Sapiens
FAKSVSFSDVF

SEQ ID NO: 138958 - protein, 11 aa, Homo Sapiens
FASKEIAENAL

SEQ ID NO: 138959 - protein, 11 aa, Homo Sapiens
FASQEIAEKAL

SEQ ID NO: 138960 - protein, 11 aa, Homo Sapiens
FAYDGKDYLTL

SEQ ID NO: 138961 - protein, 11 aa, Homo Sapiens
FAYDPSNYEYL

SEQ ID NO: 138962 - protein, 11 aa, Homo Sapiens
FLNPAAHLEPF

SEQ ID NO: 138963 - protein, 11 aa, Homo Sapiens
GIHETTFNSIM

SEQ ID NO: 138964 - protein, 11 aa, Homo Sapiens
HACGVIATIAF

SEQ ID NO: 138965 - protein, 11 aa, Homo Sapiens
LALDPSLVPTF

SEQ ID NO: 138966 - protein, 11 aa, Homo Sapiens
LAVDPNRAVPL

SEQ ID NO: 138967 - protein, 11 aa, Homo Sapiens
MAPSETQFSHL

SEQ ID NO: 138968 - protein, 11 aa, Homo Sapiens
PISLDLTFHLL

SEQ ID NO: 138969 - protein, 11 aa, Homo Sapiens
QQPNGAGFAAF

SEQ ID NO: 138970 - protein, 11 aa, Homo Sapiens
SAINEVVTREY

SEQ ID NO: 138971 - protein, 11 aa, Homo Sapiens
SAYDGKDYIAL

SEQ ID NO: 138972 - protein, 11 aa, Homo Sapiens
SLPVAPRYHLL

SEQ ID NO: 138973 - protein, 11 aa, Homo Sapiens
TTIDPRWLVEF

SEQ ID NO: 138974 - protein, 11 aa, Homo Sapiens
VAAAGVSSNPF

SEQ ID NO: 138975 - protein, 11 aa, Homo Sapiens
VAYWRQAGLSY

SEQ ID NO: 138976 - protein, 11 aa, Homo Sapiens
YAISPGLDITF

SEQ ID NO: 138977 - protein, 11 aa, Homo Sapiens
YAVDPAQLQAL

SEQ ID NO: 138978 - protein, 11 aa, Homo Sapiens
YAWESSAGGSF

SEQ ID NO: 138979 - protein, 11 aa, Homo Sapiens
YAYDGKDYIAL

SEQ ID NO: 138980 - protein, 11 aa, Homo Sapiens
YAYPATAAAPM

SEQ ID NO: 138981 - protein, 11 aa, Homo Sapiens
YGAEALERMFL

SEQ ID NO: 138982 - protein, 11 aa, Homo Sapiens
YSLDGRLLSTY

SEQ ID NO: 138983 - protein, 11 aa, Homo Sapiens
YSLPTSFSGSF

SEQ ID NO: 138984 - protein, 11 aa, Homo Sapiens
YSYPAAVPQAL

SEQ ID NO: 138985 - protein, 8 aa, Homo Sapiens
AAAPPLTL

SEQ ID NO: 138986 - protein, 8 aa, Homo Sapiens
AAAPSPVL

SEQ ID NO: 138987 - protein, 8 aa, Homo Sapiens
AAFPGASL

SEQ ID NO: 138988 - protein, 8 aa, Homo Sapiens
AAGPGFSL

SEQ ID NO: 138989 - protein, 8 aa, Homo Sapiens
AAGPPLVA

SEQ ID NO: 138990 - protein, 8 aa, Homo Sapiens
AAIKALEL

SEQ ID NO: 138991 - protein, 8 aa, Homo Sapiens
AALQFLTL

SEQ ID NO: 138992 - protein, 8 aa, Homo Sapiens
AASHPLLL

SEQ ID NO: 138993 - protein, 8 aa, Homo Sapiens
AFAEALLL

SEQ ID NO: 138994 - protein, 8 aa, Homo Sapiens
AIAQAESL

SEQ ID NO: 138995 - protein, 8 aa, Homo Sapiens
AVFLLDDK

SEQ ID NO: 138996 - protein, 8 aa, Homo Sapiens
AVGPASIL

SEQ ID NO: 138997 - protein, 8 aa, Homo Sapiens
DFFNGKEL

SEQ ID NO: 138998 - protein, 8 aa, Homo Sapiens
DGIVSHLK

SEQ ID NO: 138999 - protein, 8 aa, Homo Sapiens
EKSPSIDL

SEQ ID NO: 139000 - protein, 8 aa, Homo Sapiens
ELEDSTLR

SEQ ID NO: 139001 - protein, 8 aa, Homo Sapiens
ESLIACKA

SEQ ID NO: 139002 - protein, 8 aa, Homo Sapiens
FAAEAIAM

SEQ ID NO: 139003 - protein, 8 aa, Homo Sapiens
FAAETLVL

SEQ ID NO: 139004 - protein, 8 aa, Homo Sapiens
FAALCFVL

SEQ ID NO: 139005 - protein, 8 aa, Homo Sapiens
FAARPVLL

SEQ ID NO: 139006 - protein, 8 aa, Homo Sapiens
FAFSRQAL

SEQ ID NO: 139007 - protein, 8 aa, Homo Sapiens
FAFSSQEL

SEQ ID NO: 139008 - protein, 8 aa, Homo Sapiens
FAGALLEL

SEQ ID NO: 139009 - protein, 8 aa, Homo Sapiens
FAGDDAPR

SEQ ID NO: 139010 - protein, 8 aa, Homo Sapiens
FAGKVLRL

SEQ ID NO: 139011 - protein, 8 aa, Homo Sapiens
FAGMPITL

SEQ ID NO: 139012 - protein, 8 aa, Homo Sapiens
FAGPCKVI

SEQ ID NO: 139013 - protein, 8 aa, Homo Sapiens
FAGWGRAL

SEQ ID NO: 139014 - protein, 8 aa, Homo Sapiens
FAHSFIEL

SEQ ID NO: 139015 - protein, 8 aa, Homo Sapiens
FAHVAIAV

SEQ ID NO: 139016 - protein, 8 aa, Homo Sapiens
FAHWGQEL

SEQ ID NO: 139017 - protein, 8 aa, Homo Sapiens
FAIDPHLL

SEQ ID NO: 139018 - protein, 8 aa, Homo Sapiens
FAIRGVVL

SEQ ID NO: 139019 - protein, 8 aa, Homo Sapiens
FAIRPMYL

SEQ ID NO: 139020 - protein, 8 aa, Homo Sapiens
FAISTGSL

SEQ ID NO: 139021 - protein, 8 aa, Homo Sapiens
FALLFSEL

SEQ ID NO: 139022 - protein, 8 aa, Homo Sapiens
FANKQLEL

SEQ ID NO: 139023 - protein, 8 aa, Homo Sapiens
FAQSSIAL

SEQ ID NO: 139024 - protein, 8 aa, Homo Sapiens
FAVAGQEL

SEQ ID NO: 139025 - protein, 8 aa, Homo Sapiens
FAVEGPKL

SEQ ID NO: 139026 - protein, 8 aa, Homo Sapiens
FAWGHDEL

SEQ ID NO: 139027 - protein, 8 aa, Homo Sapiens
FFLIGPPL

SEQ ID NO: 139028 - protein, 8 aa, Homo Sapiens
FFQVGSDL

SEQ ID NO: 139029 - protein, 8 aa, Homo Sapiens
FGFRGEAL

SEQ ID NO: 139030 - protein, 8 aa, Homo Sapiens
FGHIGIAV

SEQ ID NO: 139031 - protein, 8 aa, Homo Sapiens
FIGPALLF

SEQ ID NO: 139032 - protein, 8 aa, Homo Sapiens
FIGYPITL

SEQ ID NO: 139033 - protein, 8 aa, Homo Sapiens
FITDPVVL

SEQ ID NO: 139034 - protein, 8 aa, Homo Sapiens
FLAPSLVL

SEQ ID NO: 139035 - protein, 8 aa, Homo Sapiens
FLQQPRPL

SEQ ID NO: 139036 - protein, 8 aa, Homo Sapiens
FLTDKKNR

SEQ ID NO: 139037 - protein, 8 aa, Homo Sapiens
FNFVGKIL

SEQ ID NO: 139038 - protein, 8 aa, Homo Sapiens
FNFVGRIL

SEQ ID NO: 139039 - protein, 8 aa, Homo Sapiens
FQHVGKAF

SEQ ID NO: 139040 - protein, 8 aa, Homo Sapiens
FSAIGLEL

SEQ ID NO: 139041 - protein, 8 aa, Homo Sapiens
FSANPKEL

SEQ ID NO: 139042 - protein, 8 aa, Homo Sapiens
FSFDGPEI

SEQ ID NO: 139043 - protein, 8 aa, Homo Sapiens
FSFEGPEI

SEQ ID NO: 139044 - protein, 8 aa, Homo Sapiens
FSFVMPSL

SEQ ID NO: 139045 - protein, 8 aa, Homo Sapiens
FSGPAITL

SEQ ID NO: 139046 - protein, 8 aa, Homo Sapiens
FSGRILGL

SEQ ID NO: 139047 - protein, 8 aa, Homo Sapiens
FSHQGVQL

SEQ ID NO: 139048 - protein, 8 aa, Homo Sapiens
FSHVAMIL

SEQ ID NO: 139049 - protein, 8 aa, Homo Sapiens
FSIIPREL

SEQ ID NO: 139050 - protein, 8 aa, Homo Sapiens
FSPVGSVL

SEQ ID NO: 139051 - protein, 8 aa, Homo Sapiens
FSRVSLRL

SEQ ID NO: 139052 - protein, 8 aa, Homo Sapiens
FSSNPISL

SEQ ID NO: 139053 - protein, 8 aa, Homo Sapiens
FSVTGRVL

SEQ ID NO: 139054 - protein, 8 aa, Homo Sapiens
FSVTGTSL

SEQ ID NO: 139055 - protein, 8 aa, Homo Sapiens
FSYAGFEM

SEQ ID NO: 139056 - protein, 8 aa, Homo Sapiens
FTADPLSL

SEQ ID NO: 139057 - protein, 8 aa, Homo Sapiens
FTHASPTL

SEQ ID NO: 139058 - protein, 8 aa, Homo Sapiens
FTHLGLDL

SEQ ID NO: 139059 - protein, 8 aa, Homo Sapiens
FTMGGPAI

SEQ ID NO: 139060 - protein, 8 aa, Homo Sapiens
FVGPSRYL

SEQ ID NO: 139061 - protein, 8 aa, Homo Sapiens
GAGPSLLL

SEQ ID NO: 139062 - protein, 8 aa, Homo Sapiens
GITFIAAK

SEQ ID NO: 139063 - protein, 8 aa, Homo Sapiens
HAAEALLL

SEQ ID NO: 139064 - protein, 8 aa, Homo Sapiens
HSHVGYTL

SEQ ID NO: 139065 - protein, 8 aa, Homo Sapiens
HTGPITCL

SEQ ID NO: 139066 - protein, 8 aa, Homo Sapiens
HVDPENFR

SEQ ID NO: 139067 - protein, 8 aa, Homo Sapiens
IADLAHLL

SEQ ID NO: 139068 - protein, 8 aa, Homo Sapiens
IAGPVVEI

SEQ ID NO: 139069 - protein, 8 aa, Homo Sapiens
ICGQGLKS

SEQ ID NO: 139070 - protein, 8 aa, Homo Sapiens
IGGPAILL

SEQ ID NO: 139071 - protein, 8 aa, Homo Sapiens
IIGPGIVL

SEQ ID NO: 139072 - protein, 8 aa, Homo Sapiens
ILGPTFTL

SEQ ID NO: 139073 - protein, 8 aa, Homo Sapiens
ISFSGMSL

SEQ ID NO: 139074 - protein, 8 aa, Homo Sapiens
ISILGKSL

SEQ ID NO: 139075 - protein, 8 aa, Homo Sapiens
ISIVGICL

SEQ ID NO: 139076 - protein, 8 aa, Homo Sapiens
ISLEGKPL

SEQ ID NO: 139077 - protein, 8 aa, Homo Sapiens
ITFVNKHL

SEQ ID NO: 139078 - protein, 8 aa, Homo Sapiens
ITRVGLAL

SEQ ID NO: 139079 - protein, 8 aa, Homo Sapiens
LAAIATEL

SEQ ID NO: 139080 - protein, 8 aa, Homo Sapiens
LAALPLAL

SEQ ID NO: 139081 - protein, 8 aa, Homo Sapiens
LADQPHLL

SEQ ID NO: 139082 - protein, 8 aa, Homo Sapiens
LAEVGRVL

SEQ ID NO: 139083 - protein, 8 aa, Homo Sapiens
LAFVSPSL

SEQ ID NO: 139084 - protein, 8 aa, Homo Sapiens
LAGKVLAL

SEQ ID NO: 139085 - protein, 8 aa, Homo Sapiens
LAGPALEL

SEQ ID NO: 139086 - protein, 8 aa, Homo Sapiens
LAGPPLEI

SEQ ID NO: 139087 - protein, 8 aa, Homo Sapiens
LAGPVLGL

SEQ ID NO: 139088 - protein, 8 aa, Homo Sapiens
LAHVGPRL

SEQ ID NO: 139089 - protein, 8 aa, Homo Sapiens
LALEIRSL

SEQ ID NO: 139090 - protein, 8 aa, Homo Sapiens
LALVSRAL

SEQ ID NO: 139091 - protein, 8 aa, Homo Sapiens
LASFLWIL

SEQ ID NO: 139092 - protein, 8 aa, Homo Sapiens
LAVSGVVI

SEQ ID NO: 139093 - protein, 8 aa, Homo Sapiens
LAVVGSVL

SEQ ID NO: 139094 - protein, 8 aa, Homo Sapiens
LEYVPSAK

SEQ ID NO: 139095 - protein, 8 aa, Homo Sapiens
LHTLFGDK

SEQ ID NO: 139096 - protein, 8 aa, Homo Sapiens
LIGPPLLI

SEQ ID NO: 139097 - protein, 8 aa, Homo Sapiens
LLGPTVML

SEQ ID NO: 139098 - protein, 8 aa, Homo Sapiens
LLPGELAK

SEQ ID NO: 139099 - protein, 8 aa, Homo Sapiens
LPSHPLEL

SEQ ID NO: 139100 - protein, 8 aa, Homo Sapiens
LRLPHQPL

SEQ ID NO: 139101 - protein, 8 aa, Homo Sapiens
LSVNPAAL

SEQ ID NO: 139102 - protein, 8 aa, Homo Sapiens
LSWPGLAV

SEQ ID NO: 139103 - protein, 8 aa, Homo Sapiens
LTFVDPVL

SEQ ID NO: 139104 - protein, 8 aa, Homo Sapiens
LTGPVLEL

SEQ ID NO: 139105 - protein, 8 aa, Homo Sapiens
LTGRVLAL

SEQ ID NO: 139106 - protein, 8 aa, Homo Sapiens
LTQVGSIL

SEQ ID NO: 139107 - protein, 8 aa, Homo Sapiens
LVGPGVEL

SEQ ID NO: 139108 - protein, 8 aa, Homo Sapiens
LVVVGGVL

SEQ ID NO: 139109 - protein, 8 aa, Homo Sapiens
MALLGHSL

SEQ ID NO: 139110 - protein, 8 aa, Homo Sapiens
MALLGQAL

SEQ ID NO: 139111 - protein, 8 aa, Homo Sapiens
MGGPAISM

SEQ ID NO: 139112 - protein, 8 aa, Homo Sapiens
MGHLGVVL

SEQ ID NO: 139113 - protein, 8 aa, Homo Sapiens
MSGPVTVL

SEQ ID NO: 139114 - protein, 8 aa, Homo Sapiens
MVGPILEM

SEQ ID NO: 139115 - protein, 8 aa, Homo Sapiens
NAGPAIVI

SEQ ID NO: 139116 - protein, 8 aa, Homo Sapiens
NAYTGIVL

SEQ ID NO: 139117 - protein, 8 aa, Homo Sapiens
QAAPPIEL

SEQ ID NO: 139118 - protein, 8 aa, Homo Sapiens
QILVGVNK

SEQ ID NO: 139119 - protein, 8 aa, Homo Sapiens
QTPPISSL

SEQ ID NO: 139120 - protein, 8 aa, Homo Sapiens
QYEDIANR

SEQ ID NO: 139121 - protein, 8 aa, Homo Sapiens
RAHIGPVL

SEQ ID NO: 139122 - protein, 8 aa, Homo Sapiens
RALLGPAL

SEQ ID NO: 139123 - protein, 8 aa, Homo Sapiens
RVDPVNFK

SEQ ID NO: 139124 - protein, 8 aa, Homo Sapiens
SAAPAIQL

SEQ ID NO: 139125 - protein, 8 aa, Homo Sapiens
SANIGPFL

SEQ ID NO: 139126 - protein, 8 aa, Homo Sapiens
SFTTTAER

SEQ ID NO: 139127 - protein, 8 aa, Homo Sapiens
SQSPEAIK

SEQ ID NO: 139128 - protein, 8 aa, Homo Sapiens
TAFIGPAL

SEQ ID NO: 139129 - protein, 8 aa, Homo Sapiens
TAGRVLEL

SEQ ID NO: 139130 - protein, 8 aa, Homo Sapiens
TAIVGMAL

SEQ ID NO: 139131 - protein, 8 aa, Homo Sapiens
TSDIPHML

SEQ ID NO: 139132 - protein, 8 aa, Homo Sapiens
TSYVGLVL

SEQ ID NO: 139133 - protein, 8 aa, Homo Sapiens
TYKEALEK

SEQ ID NO: 139134 - protein, 8 aa, Homo Sapiens
VADLAHVL

SEQ ID NO: 139135 - protein, 8 aa, Homo Sapiens
VAGPSVTL

SEQ ID NO: 139136 - protein, 8 aa, Homo Sapiens
VAKESIPL

SEQ ID NO: 139137 - protein, 8 aa, Homo Sapiens
VATTALEL

SEQ ID NO: 139138 - protein, 8 aa, Homo Sapiens
VAYEAPSL

SEQ ID NO: 139139 - protein, 8 aa, Homo Sapiens
VGAVGLVW

SEQ ID NO: 139140 - protein, 8 aa, Homo Sapiens
VGPETLGR

SEQ ID NO: 139141 - protein, 8 aa, Homo Sapiens
VIGPPVVL

SEQ ID NO: 139142 - protein, 8 aa, Homo Sapiens
VIIKPSEL

SEQ ID NO: 139143 - protein, 8 aa, Homo Sapiens
VSGPAMTL

SEQ ID NO: 139144 - protein, 8 aa, Homo Sapiens
VSQVGKEL

SEQ ID NO: 139145 - protein, 8 aa, Homo Sapiens
VVGPNITL

SEQ ID NO: 139146 - protein, 8 aa, Homo Sapiens
VVGPSSVL

SEQ ID NO: 139147 - protein, 8 aa, Homo Sapiens
YAARARLL

SEQ ID NO: 139148 - protein, 8 aa, Homo Sapiens
YAEGVRVL

SEQ ID NO: 139149 - protein, 8 aa, Homo Sapiens
YAFSARPL

SEQ ID NO: 139150 - protein, 8 aa, Homo Sapiens
YAGAILEV

SEQ ID NO: 139151 - protein, 8 aa, Homo Sapiens
YAGPGLSL

SEQ ID NO: 139152 - protein, 8 aa, Homo Sapiens
YAIEAIKL

SEQ ID NO: 139153 - protein, 8 aa, Homo Sapiens
YALPHAIL

SEQ ID NO: 139154 - protein, 8 aa, Homo Sapiens
YFKGAIPL

SEQ ID NO: 139155 - protein, 8 aa, Homo Sapiens
YGFDGRGL

SEQ ID NO: 139156 - protein, 8 aa, Homo Sapiens
YGFVNHAL

SEQ ID NO: 139157 - protein, 8 aa, Homo Sapiens
YIHVGAQL

SEQ ID NO: 139158 - protein, 8 aa, Homo Sapiens
YLGKVLEL

SEQ ID NO: 139159 - protein, 8 aa, Homo Sapiens
YSFDGPSL

SEQ ID NO: 139160 - protein, 8 aa, Homo Sapiens
YSHVGIAW

SEQ ID NO: 139161 - protein, 8 aa, Homo Sapiens
YSIVGQKL

SEQ ID NO: 139162 - protein, 8 aa, Homo Sapiens
YSLDMWRL

SEQ ID NO: 139163 - protein, 8 aa, Homo Sapiens
YSWLGETL

SEQ ID NO: 139164 - protein, 8 aa, Homo Sapiens
YTAEPVTL

SEQ ID NO: 139165 - protein, 8 aa, Homo Sapiens
YTNLGPRL

SEQ ID NO: 139166 - protein, 8 aa, Homo Sapiens
YTYTSKAL

SEQ ID NO: 139167 - protein, 8 aa, Homo Sapiens
YVGPAKVI

SEQ ID NO: 139168 - protein, 8 aa, Homo Sapiens
YVGPSLRM

SEQ ID NO: 139169 - protein, 8 aa, Homo Sapiens
YVSFPLEL

SEQ ID NO: 139170 - protein, 8 aa, Homo Sapiens
YWQNHPEL

SEQ ID NO: 139171 - protein, 8 aa, Homo Sapiens
YYAVAVVK

SEQ ID NO: 139172 - protein, 9 aa, Homo Sapiens
AAAAATMAL

SEQ ID NO: 139173 - protein, 9 aa, Homo Sapiens
AAAAPRAVA

SEQ ID NO: 139174 - protein, 9 aa, Homo Sapiens
AAAAPSPVL

SEQ ID NO: 139175 - protein, 9 aa, Homo Sapiens
AAAAVGGAL

SEQ ID NO: 139176 - protein, 9 aa, Homo Sapiens
AAAAVGLAL

SEQ ID NO: 139177 - protein, 9 aa, Homo Sapiens
AAADVLEAL

SEQ ID NO: 139178 - protein, 9 aa, Homo Sapiens
AAAGSPLSL

SEQ ID NO: 139179 - protein, 9 aa, Homo Sapiens
AAAGVFALL

SEQ ID NO: 139180 - protein, 9 aa, Homo Sapiens
AAAHFYFEL

SEQ ID NO: 139181 - protein, 9 aa, Homo Sapiens
AAAIKALEL

SEQ ID NO: 139182 - protein, 9 aa, Homo Sapiens
AAANPTLAF

SEQ ID NO: 139183 - protein, 9 aa, Homo Sapiens
AAAPAAPTL

SEQ ID NO: 139184 - protein, 9 aa, Homo Sapiens
AAAPAGTTF

SEQ ID NO: 139185 - protein, 9 aa, Homo Sapiens
AAAPHLLLL

SEQ ID NO: 139186 - protein, 9 aa, Homo Sapiens
AAAPPSPAW

SEQ ID NO: 139187 - protein, 9 aa, Homo Sapiens
AAAPSLLIL

SEQ ID NO: 139188 - protein, 9 aa, Homo Sapiens
AAASAFTSL

SEQ ID NO: 139189 - protein, 9 aa, Homo Sapiens
AAASHFFNL

SEQ ID NO: 139190 - protein, 9 aa, Homo Sapiens
AAAYPHTSL

SEQ ID NO: 139191 - protein, 9 aa, Homo Sapiens
AACDYIREL

SEQ ID NO: 139192 - protein, 9 aa, Homo Sapiens
AACETFLKL

SEQ ID NO: 139193 - protein, 9 aa, Homo Sapiens
AACPYFKSM

SEQ ID NO: 139194 - protein, 9 aa, Homo Sapiens
AADPQIRQF

SEQ ID NO: 139195 - protein, 9 aa, Homo Sapiens
AADPVSPLL

SEQ ID NO: 139196 - protein, 9 aa, Homo Sapiens
AADWHNLIL

SEQ ID NO: 139197 - protein, 9 aa, Homo Sapiens
AAEDAIRNL

SEQ ID NO: 139198 - protein, 9 aa, Homo Sapiens
AAEEGLREL

SEQ ID NO: 139199 - protein, 9 aa, Homo Sapiens
AAFAHFPEL

SEQ ID NO: 139200 - protein, 9 aa, Homo Sapiens
AAFQAALAL

SEQ ID NO: 139201 - protein, 9 aa, Homo Sapiens
AAFWGQMQM

SEQ ID NO: 139202 - protein, 9 aa, Homo Sapiens
AAHMPAAAL

SEQ ID NO: 139203 - protein, 9 aa, Homo Sapiens
AAIAAVNAL

SEQ ID NO: 139204 - protein, 9 aa, Homo Sapiens
AAIAPPTSL

SEQ ID NO: 139205 - protein, 9 aa, Homo Sapiens
AAIASLLYL

SEQ ID NO: 139206 - protein, 9 aa, Homo Sapiens
AAIASTPTL

SEQ ID NO: 139207 - protein, 9 aa, Homo Sapiens
AAIEGNLQL

SEQ ID NO: 139208 - protein, 9 aa, Homo Sapiens
AAIFHYLII

SEQ ID NO: 139209 - protein, 9 aa, Homo Sapiens
AAIHPSLEI

SEQ ID NO: 139210 - protein, 9 aa, Homo Sapiens
AAIKAFIAV

SEQ ID NO: 139211 - protein, 9 aa, Homo Sapiens
AAIKPGTPL

SEQ ID NO: 139212 - protein, 9 aa, Homo Sapiens
AAILPDMAL

SEQ ID NO: 139213 - protein, 9 aa, Homo Sapiens
AAINPNHPL

SEQ ID NO: 139214 - protein, 9 aa, Homo Sapiens
AAIPSAPVL

SEQ ID NO: 139215 - protein, 9 aa, Homo Sapiens
AAIPYWLLL

SEQ ID NO: 139216 - protein, 9 aa, Homo Sapiens
AAIQCLQAL

SEQ ID NO: 139217 - protein, 9 aa, Homo Sapiens
AAISHGRVF

SEQ ID NO: 139218 - protein, 9 aa, Homo Sapiens
AAISTSRVL

SEQ ID NO: 139219 - protein, 9 aa, Homo Sapiens
AAIVAKQVL

SEQ ID NO: 139220 - protein, 9 aa, Homo Sapiens
AAIVPGSQL

SEQ ID NO: 139221 - protein, 9 aa, Homo Sapiens
AAIWQYESL

SEQ ID NO: 139222 - protein, 9 aa, Homo Sapiens
AAIYHVLHF

SEQ ID NO: 139223 - protein, 9 aa, Homo Sapiens
AAIYLVTSL

SEQ ID NO: 139224 - protein, 9 aa, Homo Sapiens
AALDIYETL

SEQ ID NO: 139225 - protein, 9 aa, Homo Sapiens
AALDKATVL

SEQ ID NO: 139226 - protein, 9 aa, Homo Sapiens
AALFKAWAL

SEQ ID NO: 139227 - protein, 9 aa, Homo Sapiens
AALPCGHSL

SEQ ID NO: 139228 - protein, 9 aa, Homo Sapiens
AALPKATIL

SEQ ID NO: 139229 - protein, 9 aa, Homo Sapiens
AALPLALVL

SEQ ID NO: 139230 - protein, 9 aa, Homo Sapiens
AALPPVSPL

SEQ ID NO: 139231 - protein, 9 aa, Homo Sapiens
AALPVYQEL

SEQ ID NO: 139232 - protein, 9 aa, Homo Sapiens
AALVPRQAL

SEQ ID NO: 139233 - protein, 9 aa, Homo Sapiens
AALWRFAEL

SEQ ID NO: 139234 - protein, 9 aa, Homo Sapiens
AAMASLGAL

SEQ ID NO: 139235 - protein, 9 aa, Homo Sapiens
AAMEFLQEL

SEQ ID NO: 139236 - protein, 9 aa, Homo Sapiens
AAMKALQAL

SEQ ID NO: 139237 - protein, 9 aa, Homo Sapiens
AAMPRIYEL

SEQ ID NO: 139238 - protein, 9 aa, Homo Sapiens
AAMPVAQHL

SEQ ID NO: 139239 - protein, 9 aa, Homo Sapiens
AAMSHLLEM

SEQ ID NO: 139240 - protein, 9 aa, Homo Sapiens
AAMYKSLEL

SEQ ID NO: 139241 - protein, 9 aa, Homo Sapiens
AANKTIIYL

SEQ ID NO: 139242 - protein, 9 aa, Homo Sapiens
AANKVVLQL

SEQ ID NO: 139243 - protein, 9 aa, Homo Sapiens
AANPHSFVF

SEQ ID NO: 139244 - protein, 9 aa, Homo Sapiens
AANPIQFTL

SEQ ID NO: 139245 - protein, 9 aa, Homo Sapiens
AAQIPTAAL

SEQ ID NO: 139246 - protein, 9 aa, Homo Sapiens
AASGHFICV

SEQ ID NO: 139247 - protein, 9 aa, Homo Sapiens
AASPAGLDL

SEQ ID NO: 139248 - protein, 9 aa, Homo Sapiens
AASPQAPTL

SEQ ID NO: 139249 - protein, 9 aa, Homo Sapiens
AATAATLAL

SEQ ID NO: 139250 - protein, 9 aa, Homo Sapiens
AATDIFSYL

SEQ ID NO: 139251 - protein, 9 aa, Homo Sapiens
AATLLHLEL

SEQ ID NO: 139252 - protein, 9 aa, Homo Sapiens
AATTVLQEL

SEQ ID NO: 139253 - protein, 9 aa, Homo Sapiens
AAVALAHAL

SEQ ID NO: 139254 - protein, 9 aa, Homo Sapiens
AAVAPGHPL

SEQ ID NO: 139255 - protein, 9 aa, Homo Sapiens
AAVDAGMAM

SEQ ID NO: 139256 - protein, 9 aa, Homo Sapiens
AAVDAILSL

SEQ ID NO: 139257 - protein, 9 aa, Homo Sapiens
AAVDTNLTL

SEQ ID NO: 139258 - protein, 9 aa, Homo Sapiens
AAVGEPAFL

SEQ ID NO: 139259 - protein, 9 aa, Homo Sapiens
AAVGFLSSL

SEQ ID NO: 139260 - protein, 9 aa, Homo Sapiens
AAVHIILVI

SEQ ID NO: 139261 - protein, 9 aa, Homo Sapiens
AAVNHISQL

SEQ ID NO: 139262 - protein, 9 aa, Homo Sapiens
AAVNVICEL

SEQ ID NO: 139263 - protein, 9 aa, Homo Sapiens
AAVPDSVAL

SEQ ID NO: 139264 - protein, 9 aa, Homo Sapiens
AAVPKSLQL

SEQ ID NO: 139265 - protein, 9 aa, Homo Sapiens
AAVPKTFQL

SEQ ID NO: 139266 - protein, 9 aa, Homo Sapiens
AAVPPGSLL

SEQ ID NO: 139267 - protein, 9 aa, Homo Sapiens
AAVPRAAFL

SEQ ID NO: 139268 - protein, 9 aa, Homo Sapiens
AAVPVGYGL

SEQ ID NO: 139269 - protein, 9 aa, Homo Sapiens
AAVTGVLSL

SEQ ID NO: 139270 - protein, 9 aa, Homo Sapiens
AAVVSSPSL

SEQ ID NO: 139271 - protein, 9 aa, Homo Sapiens
AAYAGGLVL

SEQ ID NO: 139272 - protein, 9 aa, Homo Sapiens
AAYDRYLKL

SEQ ID NO: 139273 - protein, 9 aa, Homo Sapiens
AAYLRALSL

SEQ ID NO: 139274 - protein, 9 aa, Homo Sapiens
AAYYHPSYL

SEQ ID NO: 139275 - protein, 9 aa, Homo Sapiens
AFQTAYLSL

SEQ ID NO: 139276 - protein, 9 aa, Homo Sapiens
AGIAHPSAL

SEQ ID NO: 139277 - protein, 9 aa, Homo Sapiens
AGVPLFLLE

SEQ ID NO: 139278 - protein, 9 aa, Homo Sapiens
AIFIKPKSI

SEQ ID NO: 139279 - protein, 9 aa, Homo Sapiens
AIGSRLAVI

SEQ ID NO: 139280 - protein, 9 aa, Homo Sapiens
AIIPYFITL

SEQ ID NO: 139281 - protein, 9 aa, Homo Sapiens
AILMVLVAL

SEQ ID NO: 139282 - protein, 9 aa, Homo Sapiens
AIMDLLLRL

SEQ ID NO: 139283 - protein, 9 aa, Homo Sapiens
AININELFI

SEQ ID NO: 139284 - protein, 9 aa, Homo Sapiens
AIVKPGVPM

SEQ ID NO: 139285 - protein, 9 aa, Homo Sapiens
ALAGPAAAL

SEQ ID NO: 139286 - protein, 9 aa, Homo Sapiens
ALDVFALWL

SEQ ID NO: 139287 - protein, 9 aa, Homo Sapiens
ALVLLRPVI

SEQ ID NO: 139288 - protein, 9 aa, Homo Sapiens
AQYDASELK

SEQ ID NO: 139289 - protein, 9 aa, Homo Sapiens
ASIPYFHAM

SEQ ID NO: 139290 - protein, 9 aa, Homo Sapiens
ASLHVMMTL

SEQ ID NO: 139291 - protein, 9 aa, Homo Sapiens
ASLPSGLPI

SEQ ID NO: 139292 - protein, 9 aa, Homo Sapiens
ASLPVQEYL

SEQ ID NO: 139293 - protein, 9 aa, Homo Sapiens
ASSPEHPEL

SEQ ID NO: 139294 - protein, 9 aa, Homo Sapiens
ASVDKVLEL

SEQ ID NO: 139295 - protein, 9 aa, Homo Sapiens
ASVGKTSIL

SEQ ID NO: 139296 - protein, 9 aa, Homo Sapiens
ATAQPPAPL

SEQ ID NO: 139297 - protein, 9 aa, Homo Sapiens
ATGPEGVLP

SEQ ID NO: 139298 - protein, 9 aa, Homo Sapiens
ATIPPISSL

SEQ ID NO: 139299 - protein, 9 aa, Homo Sapiens
ATTHLSPEL

SEQ ID NO: 139300 - protein, 9 aa, Homo Sapiens
ATVHPGLEL

SEQ ID NO: 139301 - protein, 9 aa, Homo Sapiens
AVADAVVTA

SEQ ID NO: 139302 - protein, 9 aa, Homo Sapiens
AVAPVASAL

SEQ ID NO: 139303 - protein, 9 aa, Homo Sapiens
AVFGHPFSL

SEQ ID NO: 139304 - protein, 9 aa, Homo Sapiens
AVHPSGVAL

SEQ ID NO: 139305 - protein, 9 aa, Homo Sapiens
AVNPKFVAL

SEQ ID NO: 139306 - protein, 9 aa, Homo Sapiens
AVVDVRIGM

SEQ ID NO: 139307 - protein, 9 aa, Homo Sapiens
AVVLPHQPL

SEQ ID NO: 139308 - protein, 9 aa, Homo Sapiens
AVVPLVGKL

SEQ ID NO: 139309 - protein, 9 aa, Homo Sapiens
CAEAVSRVL

SEQ ID NO: 139310 - protein, 9 aa, Homo Sapiens
CAIAQAESL

SEQ ID NO: 139311 - protein, 9 aa, Homo Sapiens
CAYDRIVVA

SEQ ID NO: 139312 - protein, 9 aa, Homo Sapiens
CQDIGAKSL

SEQ ID NO: 139313 - protein, 9 aa, Homo Sapiens
EALTEAELL

SEQ ID NO: 139314 - protein, 9 aa, Homo Sapiens
ETARVPAPV

SEQ ID NO: 139315 - protein, 9 aa, Homo Sapiens
EVGVAIQEK

SEQ ID NO: 139316 - protein, 9 aa, Homo Sapiens
FAAAKLLAL

SEQ ID NO: 139317 - protein, 9 aa, Homo Sapiens
FAAASREVL

SEQ ID NO: 139318 - protein, 9 aa, Homo Sapiens
FAADIISVL

SEQ ID NO: 139319 - protein, 9 aa, Homo Sapiens
FAADLAEEL

SEQ ID NO: 139320 - protein, 9 aa, Homo Sapiens
FAADVLMAI

SEQ ID NO: 139321 - protein, 9 aa, Homo Sapiens
FAADVRLMF

SEQ ID NO: 139322 - protein, 9 aa, Homo Sapiens
FAAESFTFL

SEQ ID NO: 139323 - protein, 9 aa, Homo Sapiens
FAAGLGRSL

SEQ ID NO: 139324 - protein, 9 aa, Homo Sapiens
FAAISGMIL

SEQ ID NO: 139325 - protein, 9 aa, Homo Sapiens
FAALHGPAL

SEQ ID NO: 139326 - protein, 9 aa, Homo Sapiens
FAANVYEAF

SEQ ID NO: 139327 - protein, 9 aa, Homo Sapiens
FAAQRGLAV

SEQ ID NO: 139328 - protein, 9 aa, Homo Sapiens
FAATHSLEF

SEQ ID NO: 139329 - protein, 9 aa, Homo Sapiens
FAAVEGIFF

SEQ ID NO: 139330 - protein, 9 aa, Homo Sapiens
FACEKNENL

SEQ ID NO: 139331 - protein, 9 aa, Homo Sapiens
FACLMFKHL

SEQ ID NO: 139332 - protein, 9 aa, Homo Sapiens
FADAASLLL

SEQ ID NO: 139333 - protein, 9 aa, Homo Sapiens
FADALCIGI

SEQ ID NO: 139334 - protein, 9 aa, Homo Sapiens
FADDGVKYL

SEQ ID NO: 139335 - protein, 9 aa, Homo Sapiens
FADELSHLL

SEQ ID NO: 139336 - protein, 9 aa, Homo Sapiens
FADFERHFL

SEQ ID NO: 139337 - protein, 9 aa, Homo Sapiens
FADGFVKAL

SEQ ID NO: 139338 - protein, 9 aa, Homo Sapiens
FADGHVLEL

SEQ ID NO: 139339 - protein, 9 aa, Homo Sapiens
FADGVILLL

SEQ ID NO: 139340 - protein, 9 aa, Homo Sapiens
FADGVYLVL

SEQ ID NO: 139341 - protein, 9 aa, Homo Sapiens
FADHPRAPF

SEQ ID NO: 139342 - protein, 9 aa, Homo Sapiens
FADHVSSSL

SEQ ID NO: 139343 - protein, 9 aa, Homo Sapiens
FADKHIQVL

SEQ ID NO: 139344 - protein, 9 aa, Homo Sapiens
FADLGYKQM

SEQ ID NO: 139345 - protein, 9 aa, Homo Sapiens
FADLSLKSL

SEQ ID NO: 139346 - protein, 9 aa, Homo Sapiens
FADPHGKVF

SEQ ID NO: 139347 - protein, 9 aa, Homo Sapiens
FADPIAANL

SEQ ID NO: 139348 - protein, 9 aa, Homo Sapiens
FADQEVRSL

SEQ ID NO: 139349 - protein, 9 aa, Homo Sapiens
FADSTVRVW

SEQ ID NO: 139350 - protein, 9 aa, Homo Sapiens
FADVAPLQL

SEQ ID NO: 139351 - protein, 9 aa, Homo Sapiens
FADVLVHRL

SEQ ID NO: 139352 - protein, 9 aa, Homo Sapiens
FADVNGWHL

SEQ ID NO: 139353 - protein, 9 aa, Homo Sapiens
FAEARARAW

SEQ ID NO: 139354 - protein, 9 aa, Homo Sapiens
FAEDPPTSL

SEQ ID NO: 139355 - protein, 9 aa, Homo Sapiens
FAEDSLRVI

SEQ ID NO: 139356 - protein, 9 aa, Homo Sapiens
FAEEQTLVL

SEQ ID NO: 139357 - protein, 9 aa, Homo Sapiens
FAEEVGAAL

SEQ ID NO: 139358 - protein, 9 aa, Homo Sapiens
FAEGFVKAL

SEQ ID NO: 139359 - protein, 9 aa, Homo Sapiens
FAEGFVRAL

SEQ ID NO: 139360 - protein, 9 aa, Homo Sapiens
FAEGKPLAL

SEQ ID NO: 139361 - protein, 9 aa, Homo Sapiens
FAEGKPLEL

SEQ ID NO: 139362 - protein, 9 aa, Homo Sapiens
FAENNFTEL

SEQ ID NO: 139363 - protein, 9 aa, Homo Sapiens
FAEPGRVPF

SEQ ID NO: 139364 - protein, 9 aa, Homo Sapiens
FAEQKFRKL

SEQ ID NO: 139365 - protein, 9 aa, Homo Sapiens
FAESLRTSL

SEQ ID NO: 139366 - protein, 9 aa, Homo Sapiens
FAETGRTFL

SEQ ID NO: 139367 - protein, 9 aa, Homo Sapiens
FAFDEIVAL

SEQ ID NO: 139368 - protein, 9 aa, Homo Sapiens
FAFLTGVGL

SEQ ID NO: 139369 - protein, 9 aa, Homo Sapiens
FAFRNFLYL

SEQ ID NO: 139370 - protein, 9 aa, Homo Sapiens
FAFSCLLTL

SEQ ID NO: 139371 - protein, 9 aa, Homo Sapiens
FAGDIANQL

SEQ ID NO: 139372 - protein, 9 aa, Homo Sapiens
FAGFQRKAV

SEQ ID NO: 139373 - protein, 9 aa, Homo Sapiens
FAGGHPAQL

SEQ ID NO: 139374 - protein, 9 aa, Homo Sapiens
FAGLVFLHL

SEQ ID NO: 139375 - protein, 9 aa, Homo Sapiens
FAGNTPLHL

SEQ ID NO: 139376 - protein, 9 aa, Homo Sapiens
FAGVERLAL

SEQ ID NO: 139377 - protein, 9 aa, Homo Sapiens
FAHEVGHNF

SEQ ID NO: 139378 - protein, 9 aa, Homo Sapiens
FAHLNSPQL

SEQ ID NO: 139379 - protein, 9 aa, Homo Sapiens
FAHLRLEVL

SEQ ID NO: 139380 - protein, 9 aa, Homo Sapiens
FAHPPLLVL

SEQ ID NO: 139381 - protein, 9 aa, Homo Sapiens
FAHPYQYEL

SEQ ID NO: 139382 - protein, 9 aa, Homo Sapiens
FAHQTISAL

SEQ ID NO: 139383 - protein, 9 aa, Homo Sapiens
FAHTNVESL

SEQ ID NO: 139384 - protein, 9 aa, Homo Sapiens
FAIDPHLLL

SEQ ID NO: 139385 - protein, 9 aa, Homo Sapiens
FAIDSSHPW

SEQ ID NO: 139386 - protein, 9 aa, Homo Sapiens
FAIETVKNL

SEQ ID NO: 139387 - protein, 9 aa, Homo Sapiens
FAIGGLCNL

SEQ ID NO: 139388 - protein, 9 aa, Homo Sapiens
FAIGILCSL

SEQ ID NO: 139389 - protein, 9 aa, Homo Sapiens
FAIGLTPML

SEQ ID NO: 139390 - protein, 9 aa, Homo Sapiens
FAIKSLRKL

SEQ ID NO: 139391 - protein, 9 aa, Homo Sapiens
FAILIHDVL

SEQ ID NO: 139392 - protein, 9 aa, Homo Sapiens
FAILRQAEL

SEQ ID NO: 139393 - protein, 9 aa, Homo Sapiens
FAINNSKSF

SEQ ID NO: 139394 - protein, 9 aa, Homo Sapiens
FAIPGSIFL

SEQ ID NO: 139395 - protein, 9 aa, Homo Sapiens
FAIPGSSFL

SEQ ID NO: 139396 - protein, 9 aa, Homo Sapiens
FAIPLIEKL

SEQ ID NO: 139397 - protein, 9 aa, Homo Sapiens
FAIPMIHAV

SEQ ID NO: 139398 - protein, 9 aa, Homo Sapiens
FAIPVGSGL

SEQ ID NO: 139399 - protein, 9 aa, Homo Sapiens
FAIQKGLQA

SEQ ID NO: 139400 - protein, 9 aa, Homo Sapiens
FAISILQQI

SEQ ID NO: 139401 - protein, 9 aa, Homo Sapiens
FAISKNIQL

SEQ ID NO: 139402 - protein, 9 aa, Homo Sapiens
FAKPENIDL

SEQ ID NO: 139403 - protein, 9 aa, Homo Sapiens
FALAKGECM

SEQ ID NO: 139404 - protein, 9 aa, Homo Sapiens
FALDMKYAL

SEQ ID NO: 139405 - protein, 9 aa, Homo Sapiens
FALDSGLEI

SEQ ID NO: 139406 - protein, 9 aa, Homo Sapiens
FALGAALQL

SEQ ID NO: 139407 - protein, 9 aa, Homo Sapiens
FALGAGTAL

SEQ ID NO: 139408 - protein, 9 aa, Homo Sapiens
FALGKILSV

SEQ ID NO: 139409 - protein, 9 aa, Homo Sapiens
FALGPVASV

SEQ ID NO: 139410 - protein, 9 aa, Homo Sapiens
FALGVYRTL

SEQ ID NO: 139411 - protein, 9 aa, Homo Sapiens
FALLAGTAV

SEQ ID NO: 139412 - protein, 9 aa, Homo Sapiens
FALNLFKHL

SEQ ID NO: 139413 - protein, 9 aa, Homo Sapiens
FALPFGRTA

SEQ ID NO: 139414 - protein, 9 aa, Homo Sapiens
FALPGNSQL

SEQ ID NO: 139415 - protein, 9 aa, Homo Sapiens
FALPILNAL

SEQ ID NO: 139416 - protein, 9 aa, Homo Sapiens
FALPVGLIV

SEQ ID NO: 139417 - protein, 9 aa, Homo Sapiens
FALPYIRDV

SEQ ID NO: 139418 - protein, 9 aa, Homo Sapiens
FALPYVIVL

SEQ ID NO: 139419 - protein, 9 aa, Homo Sapiens
FALSEAMGL

SEQ ID NO: 139420 - protein, 9 aa, Homo Sapiens
FALSGPLFL

SEQ ID NO: 139421 - protein, 9 aa, Homo Sapiens
FALSQPRAM

SEQ ID NO: 139422 - protein, 9 aa, Homo Sapiens
FAMDVYKNL

SEQ ID NO: 139423 - protein, 9 aa, Homo Sapiens
FAMEIDPSL

SEQ ID NO: 139424 - protein, 9 aa, Homo Sapiens
FAMIPAKEA

SEQ ID NO: 139425 - protein, 9 aa, Homo Sapiens
FAMIVSSAL

SEQ ID NO: 139426 - protein, 9 aa, Homo Sapiens
FAMKEFIAT

SEQ ID NO: 139427 - protein, 9 aa, Homo Sapiens
FAMPPPHGM

SEQ ID NO: 139428 - protein, 9 aa, Homo Sapiens
FAMPYFIQV

SEQ ID NO: 139429 - protein, 9 aa, Homo Sapiens
FAMQLVKIL

SEQ ID NO: 139430 - protein, 9 aa, Homo Sapiens
FAMYPPSMI

SEQ ID NO: 139431 - protein, 9 aa, Homo Sapiens
FANAHTYHI

SEQ ID NO: 139432 - protein, 9 aa, Homo Sapiens
FANEPFADF

SEQ ID NO: 139433 - protein, 9 aa, Homo Sapiens
FANERCLQL

SEQ ID NO: 139434 - protein, 9 aa, Homo Sapiens
FANKQMNQI

SEQ ID NO: 139435 - protein, 9 aa, Homo Sapiens
FANLKYVSL

SEQ ID NO: 139436 - protein, 9 aa, Homo Sapiens
FANLPNQVH

SEQ ID NO: 139437 - protein, 9 aa, Homo Sapiens
FANLPNQVY

SEQ ID NO: 139438 - protein, 9 aa, Homo Sapiens
FANNVQLSL

SEQ ID NO: 139439 - protein, 9 aa, Homo Sapiens
FAQAPQLSV

SEQ ID NO: 139440 - protein, 9 aa, Homo Sapiens
FAQDVGRMF

SEQ ID NO: 139441 - protein, 9 aa, Homo Sapiens
FAQEAISVL

SEQ ID NO: 139442 - protein, 9 aa, Homo Sapiens
FAQEALTVL

SEQ ID NO: 139443 - protein, 9 aa, Homo Sapiens
FAQKSGYFL

SEQ ID NO: 139444 - protein, 9 aa, Homo Sapiens
FAQMYQKTL

SEQ ID NO: 139445 - protein, 9 aa, Homo Sapiens
FAQPSGLSL

SEQ ID NO: 139446 - protein, 9 aa, Homo Sapiens
FAQTLHPSL

SEQ ID NO: 139447 - protein, 9 aa, Homo Sapiens
FAQYLISEL

SEQ ID NO: 139448 - protein, 9 aa, Homo Sapiens
FARPASPSL

SEQ ID NO: 139449 - protein, 9 aa, Homo Sapiens
FASDVQFVL

SEQ ID NO: 139450 - protein, 9 aa, Homo Sapiens
FASELSRSL

SEQ ID NO: 139451 - protein, 9 aa, Homo Sapiens
FASETNLDF

SEQ ID NO: 139452 - protein, 9 aa, Homo Sapiens
FASEVSNVL

SEQ ID NO: 139453 - protein, 9 aa, Homo Sapiens
FASEYPLIL

SEQ ID NO: 139454 - protein, 9 aa, Homo Sapiens
FASFPHMVL

SEQ ID NO: 139455 - protein, 9 aa, Homo Sapiens
FASGAFLHI

SEQ ID NO: 139456 - protein, 9 aa, Homo Sapiens
FASHVSPEV

SEQ ID NO: 139457 - protein, 9 aa, Homo Sapiens
FASIAGLEF

SEQ ID NO: 139458 - protein, 9 aa, Homo Sapiens
FASIPGLEF

SEQ ID NO: 139459 - protein, 9 aa, Homo Sapiens
FASLPDPVL

SEQ ID NO: 139460 - protein, 9 aa, Homo Sapiens
FASPNGEQF

SEQ ID NO: 139461 - protein, 9 aa, Homo Sapiens
FASQSMPTI

SEQ ID NO: 139462 - protein, 9 aa, Homo Sapiens
FASSPLRVL

SEQ ID NO: 139463 - protein, 9 aa, Homo Sapiens
FASTYLLLL

SEQ ID NO: 139464 - protein, 9 aa, Homo Sapiens
FATDAILAT

SEQ ID NO: 139465 - protein, 9 aa, Homo Sapiens
FATDSGLEF

SEQ ID NO: 139466 - protein, 9 aa, Homo Sapiens
FATEGLRTL

SEQ ID NO: 139467 - protein, 9 aa, Homo Sapiens
FATEVRAVI

SEQ ID NO: 139468 - protein, 9 aa, Homo Sapiens
FATFPSSAF

SEQ ID NO: 139469 - protein, 9 aa, Homo Sapiens
FATGVWHQM

SEQ ID NO: 139470 - protein, 9 aa, Homo Sapiens
FATIKSASL

SEQ ID NO: 139471 - protein, 9 aa, Homo Sapiens
FATSTEPVL

SEQ ID NO: 139472 - protein, 9 aa, Homo Sapiens
FATTNQISL

SEQ ID NO: 139473 - protein, 9 aa, Homo Sapiens
FATTSPLVL

SEQ ID NO: 139474 - protein, 9 aa, Homo Sapiens
FAVALPQLL

SEQ ID NO: 139475 - protein, 9 aa, Homo Sapiens
FAVATPEEL

SEQ ID NO: 139476 - protein, 9 aa, Homo Sapiens
FAVDREARL

SEQ ID NO: 139477 - protein, 9 aa, Homo Sapiens
FAVEYFTRL

SEQ ID NO: 139478 - protein, 9 aa, Homo Sapiens
FAVGPGHGI

SEQ ID NO: 139479 - protein, 9 aa, Homo Sapiens
FAVGSFHTL

SEQ ID NO: 139480 - protein, 9 aa, Homo Sapiens
FAVGVQQVL

SEQ ID NO: 139481 - protein, 9 aa, Homo Sapiens
FAVIAHVGM

SEQ ID NO: 139482 - protein, 9 aa, Homo Sapiens
FAVISRHSL

SEQ ID NO: 139483 - protein, 9 aa, Homo Sapiens
FAVLEDHTL

SEQ ID NO: 139484 - protein, 9 aa, Homo Sapiens
FAVNKWHNL

SEQ ID NO: 139485 - protein, 9 aa, Homo Sapiens
FAVNMFRTL

SEQ ID NO: 139486 - protein, 9 aa, Homo Sapiens
FAVPENSSV

SEQ ID NO: 139487 - protein, 9 aa, Homo Sapiens
FAVPESDHL

SEQ ID NO: 139488 - protein, 9 aa, Homo Sapiens
FAVPKNYKL

SEQ ID NO: 139489 - protein, 9 aa, Homo Sapiens
FAVSDGLEL

SEQ ID NO: 139490 - protein, 9 aa, Homo Sapiens
FAVTLETVL

SEQ ID NO: 139491 - protein, 9 aa, Homo Sapiens
FAVVPSTAT

SEQ ID NO: 139492 - protein, 9 aa, Homo Sapiens
FAVYIHALL

SEQ ID NO: 139493 - protein, 9 aa, Homo Sapiens
FAWPQPASL

SEQ ID NO: 139494 - protein, 9 aa, Homo Sapiens
FAYEDIKTL

SEQ ID NO: 139495 - protein, 9 aa, Homo Sapiens
FAYEGPMYL

SEQ ID NO: 139496 - protein, 9 aa, Homo Sapiens
FAYGLLMEL

SEQ ID NO: 139497 - protein, 9 aa, Homo Sapiens
FAYLRDLLI

SEQ ID NO: 139498 - protein, 9 aa, Homo Sapiens
FAYMPNNSL

SEQ ID NO: 139499 - protein, 9 aa, Homo Sapiens
FAYPAIRYL

SEQ ID NO: 139500 - protein, 9 aa, Homo Sapiens
FAYRGFKYL

SEQ ID NO: 139501 - protein, 9 aa, Homo Sapiens
FAYTARISV

SEQ ID NO: 139502 - protein, 9 aa, Homo Sapiens
FAYTSRHEI

SEQ ID NO: 139503 - protein, 9 aa, Homo Sapiens
FAYVEGESL

SEQ ID NO: 139504 - protein, 9 aa, Homo Sapiens
FCIEVGKNL

SEQ ID NO: 139505 - protein, 9 aa, Homo Sapiens
FFMPGFAPL

SEQ ID NO: 139506 - protein, 9 aa, Homo Sapiens
FGCPNPRQL

SEQ ID NO: 139507 - protein, 9 aa, Homo Sapiens
FGDVTAHLL

SEQ ID NO: 139508 - protein, 9 aa, Homo Sapiens
FGEMGGKFM

SEQ ID NO: 139509 - protein, 9 aa, Homo Sapiens
FGGPEVLKL

SEQ ID NO: 139510 - protein, 9 aa, Homo Sapiens
FGHYQQAEL

SEQ ID NO: 139511 - protein, 9 aa, Homo Sapiens
FGIDPIWSL

SEQ ID NO: 139512 - protein, 9 aa, Homo Sapiens
FGIDRPAEL

SEQ ID NO: 139513 - protein, 9 aa, Homo Sapiens
FGINHGIEL

SEQ ID NO: 139514 - protein, 9 aa, Homo Sapiens
FGINKVSKL

SEQ ID NO: 139515 - protein, 9 aa, Homo Sapiens
FGIPVLMAL

SEQ ID NO: 139516 - protein, 9 aa, Homo Sapiens
FGKAAGPSL

SEQ ID NO: 139517 - protein, 9 aa, Homo Sapiens
FGLARAFSL

SEQ ID NO: 139518 - protein, 9 aa, Homo Sapiens
FGLPRWVTL

SEQ ID NO: 139519 - protein, 9 aa, Homo Sapiens
FGMIVSSAL

SEQ ID NO: 139520 - protein, 9 aa, Homo Sapiens
FGMQARYSL

SEQ ID NO: 139521 - protein, 9 aa, Homo Sapiens
FGNGWIPTL

SEQ ID NO: 139522 - protein, 9 aa, Homo Sapiens
FGNNKLTTF

SEQ ID NO: 139523 - protein, 9 aa, Homo Sapiens
FGNPRGTFL

SEQ ID NO: 139524 - protein, 9 aa, Homo Sapiens
FGNPRKPVL

SEQ ID NO: 139525 - protein, 9 aa, Homo Sapiens
FGVDPYNVL

SEQ ID NO: 139526 - protein, 9 aa, Homo Sapiens
FGVIPSTPL

SEQ ID NO: 139527 - protein, 9 aa, Homo Sapiens
FGVPVVVAL

SEQ ID NO: 139528 - protein, 9 aa, Homo Sapiens
FGWSHLEAL

SEQ ID NO: 139529 - protein, 9 aa, Homo Sapiens
FGYDKPHVL

SEQ ID NO: 139530 - protein, 9 aa, Homo Sapiens
FGYDYPSVL

SEQ ID NO: 139531 - protein, 9 aa, Homo Sapiens
FGYPDPTYL

SEQ ID NO: 139532 - protein, 9 aa, Homo Sapiens
FGYSDALEL

SEQ ID NO: 139533 - protein, 9 aa, Homo Sapiens
FIADHCPTL

SEQ ID NO: 139534 - protein, 9 aa, Homo Sapiens
FIADPLCSL

SEQ ID NO: 139535 - protein, 9 aa, Homo Sapiens
FIAEHYMFL

SEQ ID NO: 139536 - protein, 9 aa, Homo Sapiens
FIAPSGHGL

SEQ ID NO: 139537 - protein, 9 aa, Homo Sapiens
FIAPTGHSL

SEQ ID NO: 139538 - protein, 9 aa, Homo Sapiens
FICDHPQIM

SEQ ID NO: 139539 - protein, 9 aa, Homo Sapiens
FICPITREL

SEQ ID NO: 139540 - protein, 9 aa, Homo Sapiens
FIDGGGSVL

SEQ ID NO: 139541 - protein, 9 aa, Homo Sapiens
FIDGHFVEM

SEQ ID NO: 139542 - protein, 9 aa, Homo Sapiens
FIDTAQHML

SEQ ID NO: 139543 - protein, 9 aa, Homo Sapiens
FIEDAVHVL

SEQ ID NO: 139544 - protein, 9 aa, Homo Sapiens
FIEPNVRFW

SEQ ID NO: 139545 - protein, 9 aa, Homo Sapiens
FIFLPGNTL

SEQ ID NO: 139546 - protein, 9 aa, Homo Sapiens
FIFSDTHEL

SEQ ID NO: 139547 - protein, 9 aa, Homo Sapiens
FIGDSGIPL

SEQ ID NO: 139548 - protein, 9 aa, Homo Sapiens
FIIDGKGVL

SEQ ID NO: 139549 - protein, 9 aa, Homo Sapiens
FIIISSQHL

SEQ ID NO: 139550 - protein, 9 aa, Homo Sapiens
FIIKPGSGA

SEQ ID NO: 139551 - protein, 9 aa, Homo Sapiens
FIIPSCIAI

SEQ ID NO: 139552 - protein, 9 aa, Homo Sapiens
FIIQGLRSV

SEQ ID NO: 139553 - protein, 9 aa, Homo Sapiens
FIISRTQAL

SEQ ID NO: 139554 - protein, 9 aa, Homo Sapiens
FIITPGGCL

SEQ ID NO: 139555 - protein, 9 aa, Homo Sapiens
FIIYDTHSL

SEQ ID NO: 139556 - protein, 9 aa, Homo Sapiens
FILEHIMVI

SEQ ID NO: 139557 - protein, 9 aa, Homo Sapiens
FILEHIMVV

SEQ ID NO: 139558 - protein, 9 aa, Homo Sapiens
FILEPRSFL

SEQ ID NO: 139559 - protein, 9 aa, Homo Sapiens
FILGHLRTL

SEQ ID NO: 139560 - protein, 9 aa, Homo Sapiens
FIMDRAQAL

SEQ ID NO: 139561 - protein, 9 aa, Homo Sapiens
FIMSATPTM

SEQ ID NO: 139562 - protein, 9 aa, Homo Sapiens
FINGDISSL

SEQ ID NO: 139563 - protein, 9 aa, Homo Sapiens
FIPATGHSL

SEQ ID NO: 139564 - protein, 9 aa, Homo Sapiens
FIQAVRQTL

SEQ ID NO: 139565 - protein, 9 aa, Homo Sapiens
FIQQCIRQL

SEQ ID NO: 139566 - protein, 9 aa, Homo Sapiens
FIRVSGSEL

SEQ ID NO: 139567 - protein, 9 aa, Homo Sapiens
FISGHTSEL

SEQ ID NO: 139568 - protein, 9 aa, Homo Sapiens
FISHLFMQL

SEQ ID NO: 139569 - protein, 9 aa, Homo Sapiens
FISPTGHSL

SEQ ID NO: 139570 - protein, 9 aa, Homo Sapiens
FITDHVNSL

SEQ ID NO: 139571 - protein, 9 aa, Homo Sapiens
FITESYQTL

SEQ ID NO: 139572 - protein, 9 aa, Homo Sapiens
FITPTGHSL

SEQ ID NO: 139573 - protein, 9 aa, Homo Sapiens
FIVDARPAM

SEQ ID NO: 139574 - protein, 9 aa, Homo Sapiens
FIVEETLPL

SEQ ID NO: 139575 - protein, 9 aa, Homo Sapiens
FLADPVSNM

SEQ ID NO: 139576 - protein, 9 aa, Homo Sapiens
FLAEAARSL

SEQ ID NO: 139577 - protein, 9 aa, Homo Sapiens
FLAHIYTEL

SEQ ID NO: 139578 - protein, 9 aa, Homo Sapiens
FLANVSTVL

SEQ ID NO: 139579 - protein, 9 aa, Homo Sapiens
FLCPFHLSV

SEQ ID NO: 139580 - protein, 9 aa, Homo Sapiens
FLCVVSKEL

SEQ ID NO: 139581 - protein, 9 aa, Homo Sapiens
FLDEKTHEL

SEQ ID NO: 139582 - protein, 9 aa, Homo Sapiens
FLEGRHAEL

SEQ ID NO: 139583 - protein, 9 aa, Homo Sapiens
FLENHVRHL

SEQ ID NO: 139584 - protein, 9 aa, Homo Sapiens
FLFDHLLTL

SEQ ID NO: 139585 - protein, 9 aa, Homo Sapiens
FLFPPAESL

SEQ ID NO: 139586 - protein, 9 aa, Homo Sapiens
FLFSKFIEL

SEQ ID NO: 139587 - protein, 9 aa, Homo Sapiens
FLHPHLLVL

SEQ ID NO: 139588 - protein, 9 aa, Homo Sapiens
FLIAKVKYL

SEQ ID NO: 139589 - protein, 9 aa, Homo Sapiens
FLIIPLHSL

SEQ ID NO: 139590 - protein, 9 aa, Homo Sapiens
FLINFIHTL

SEQ ID NO: 139591 - protein, 9 aa, Homo Sapiens
FLIPFVITV

SEQ ID NO: 139592 - protein, 9 aa, Homo Sapiens
FLIPKFFEL

SEQ ID NO: 139593 - protein, 9 aa, Homo Sapiens
FLIRESETL

SEQ ID NO: 139594 - protein, 9 aa, Homo Sapiens
FLLEKPFSV

SEQ ID NO: 139595 - protein, 9 aa, Homo Sapiens
FLLPLIIVL

SEQ ID NO: 139596 - protein, 9 aa, Homo Sapiens
FLLPVINEM

SEQ ID NO: 139597 - protein, 9 aa, Homo Sapiens
FLLQHVQEL

SEQ ID NO: 139598 - protein, 9 aa, Homo Sapiens
FLMDAGSVL

SEQ ID NO: 139599 - protein, 9 aa, Homo Sapiens
FLNQPHMVL

SEQ ID NO: 139600 - protein, 9 aa, Homo Sapiens
FLPDHPIVL

SEQ ID NO: 139601 - protein, 9 aa, Homo Sapiens
FLQDTRLAL

SEQ ID NO: 139602 - protein, 9 aa, Homo Sapiens
FLQEHNTTL

SEQ ID NO: 139603 - protein, 9 aa, Homo Sapiens
FLQQPRPLM

SEQ ID NO: 139604 - protein, 9 aa, Homo Sapiens
FLQTPLTEL

SEQ ID NO: 139605 - protein, 9 aa, Homo Sapiens
FLSHIPITL

SEQ ID NO: 139606 - protein, 9 aa, Homo Sapiens
FLSSSNLSL

SEQ ID NO: 139607 - protein, 9 aa, Homo Sapiens
FLVEHNLVL

SEQ ID NO: 139608 - protein, 9 aa, Homo Sapiens
FLVEHVLTL

SEQ ID NO: 139609 - protein, 9 aa, Homo Sapiens
FLVHNVKEL

SEQ ID NO: 139610 - protein, 9 aa, Homo Sapiens
FLYAGHIFL

SEQ ID NO: 139611 - protein, 9 aa, Homo Sapiens
FLYPFFGVL

SEQ ID NO: 139612 - protein, 9 aa, Homo Sapiens
FLYPFPLAL

SEQ ID NO: 139613 - protein, 9 aa, Homo Sapiens
FLYSGHLAL

SEQ ID NO: 139614 - protein, 9 aa, Homo Sapiens
FMSDLMKAL

SEQ ID NO: 139615 - protein, 9 aa, Homo Sapiens
FNDPNAKEM

SEQ ID NO: 139616 - protein, 9 aa, Homo Sapiens
FNDPVAMVL

SEQ ID NO: 139617 - protein, 9 aa, Homo Sapiens
FNYPGGVAM

SEQ ID NO: 139618 - protein, 9 aa, Homo Sapiens
FQAPTAKEM

SEQ ID NO: 139619 - protein, 9 aa, Homo Sapiens
FQEADSPTL

SEQ ID NO: 139620 - protein, 9 aa, Homo Sapiens
FQFGVPQAL

SEQ ID NO: 139621 - protein, 9 aa, Homo Sapiens
FQIAQYKCL

SEQ ID NO: 139622 - protein, 9 aa, Homo Sapiens
FQIQTSTSL

SEQ ID NO: 139623 - protein, 9 aa, Homo Sapiens
FQLEHIMDL

SEQ ID NO: 139624 - protein, 9 aa, Homo Sapiens
FQNEVARQL

SEQ ID NO: 139625 - protein, 9 aa, Homo Sapiens
FQNPFRSEL

SEQ ID NO: 139626 - protein, 9 aa, Homo Sapiens
FQNPSTVTL

SEQ ID NO: 139627 - protein, 9 aa, Homo Sapiens
FQSSAVMAL

SEQ ID NO: 139628 - protein, 9 aa, Homo Sapiens
FQTEVGKQL

SEQ ID NO: 139629 - protein, 9 aa, Homo Sapiens
FQTHTTPVL

SEQ ID NO: 139630 - protein, 9 aa, Homo Sapiens
FQTIARNAL

SEQ ID NO: 139631 - protein, 9 aa, Homo Sapiens
FQVNHTVAL

SEQ ID NO: 139632 - protein, 9 aa, Homo Sapiens
FQYDHEAFL

SEQ ID NO: 139633 - protein, 9 aa, Homo Sapiens
FQYPDTRYL

SEQ ID NO: 139634 - protein, 9 aa, Homo Sapiens
FQYSKSPSL

SEQ ID NO: 139635 - protein, 9 aa, Homo Sapiens
FSAGEPRVL

SEQ ID NO: 139636 - protein, 9 aa, Homo Sapiens
FSAPPGSEL

SEQ ID NO: 139637 - protein, 9 aa, Homo Sapiens
FSAPSGTGL

SEQ ID NO: 139638 - protein, 9 aa, Homo Sapiens
FSDDSDLQL

SEQ ID NO: 139639 - protein, 9 aa, Homo Sapiens
FSDFEARQL

SEQ ID NO: 139640 - protein, 9 aa, Homo Sapiens
FSDLTMHEL

SEQ ID NO: 139641 - protein, 9 aa, Homo Sapiens
FSDPFLKYL

SEQ ID NO: 139642 - protein, 9 aa, Homo Sapiens
FSDPIHPQL

SEQ ID NO: 139643 - protein, 9 aa, Homo Sapiens
FSDPVYKEI

SEQ ID NO: 139644 - protein, 9 aa, Homo Sapiens
FSEDGYRTV

SEQ ID NO: 139645 - protein, 9 aa, Homo Sapiens
FSEGGERLL

SEQ ID NO: 139646 - protein, 9 aa, Homo Sapiens
FSEPFHLIV

SEQ ID NO: 139647 - protein, 9 aa, Homo Sapiens
FSESHLVII

SEQ ID NO: 139648 - protein, 9 aa, Homo Sapiens
FSFEAQGGL

SEQ ID NO: 139649 - protein, 9 aa, Homo Sapiens
FSFHHVLSL

SEQ ID NO: 139650 - protein, 9 aa, Homo Sapiens
FSFPEPEAL

SEQ ID NO: 139651 - protein, 9 aa, Homo Sapiens
FSFVRITAL

SEQ ID NO: 139652 - protein, 9 aa, Homo Sapiens
FSFVRVISL

SEQ ID NO: 139653 - protein, 9 aa, Homo Sapiens
FSHAQTVVL

SEQ ID NO: 139654 - protein, 9 aa, Homo Sapiens
FSHEVGSEL

SEQ ID NO: 139655 - protein, 9 aa, Homo Sapiens
FSHPREPAL

SEQ ID NO: 139656 - protein, 9 aa, Homo Sapiens
FSIADSIEL

SEQ ID NO: 139657 - protein, 9 aa, Homo Sapiens
FSIDPARTL

SEQ ID NO: 139658 - protein, 9 aa, Homo Sapiens
FSIDRALNV

SEQ ID NO: 139659 - protein, 9 aa, Homo Sapiens
FSIDSPDSL

SEQ ID NO: 139660 - protein, 9 aa, Homo Sapiens
FSIEPWLKV

SEQ ID NO: 139661 - protein, 9 aa, Homo Sapiens
FSIGADTAL

SEQ ID NO: 139662 - protein, 9 aa, Homo Sapiens
FSIPFAPHI

SEQ ID NO: 139663 - protein, 9 aa, Homo Sapiens
FSIPILMQL

SEQ ID NO: 139664 - protein, 9 aa, Homo Sapiens
FSIPVVSDV

SEQ ID NO: 139665 - protein, 9 aa, Homo Sapiens
FSIPVVWTL

SEQ ID NO: 139666 - protein, 9 aa, Homo Sapiens
FSITPLSEL

SEQ ID NO: 139667 - protein, 9 aa, Homo Sapiens
FSLDLVHTL

SEQ ID NO: 139668 - protein, 9 aa, Homo Sapiens
FSLETHTAL

SEQ ID NO: 139669 - protein, 9 aa, Homo Sapiens
FSLLPLSHL

SEQ ID NO: 139670 - protein, 9 aa, Homo Sapiens
FSLPGATCL

SEQ ID NO: 139671 - protein, 9 aa, Homo Sapiens
FSLPHPEAL

SEQ ID NO: 139672 - protein, 9 aa, Homo Sapiens
FSLPPGHAV

SEQ ID NO: 139673 - protein, 9 aa, Homo Sapiens
FSMDIIDSL

SEQ ID NO: 139674 - protein, 9 aa, Homo Sapiens
FSMLESPAL

SEQ ID NO: 139675 - protein, 9 aa, Homo Sapiens
FSNAHINEL

SEQ ID NO: 139676 - protein, 9 aa, Homo Sapiens
FSNGHIKVL

SEQ ID NO: 139677 - protein, 9 aa, Homo Sapiens
FSNLGTTHL

SEQ ID NO: 139678 - protein, 9 aa, Homo Sapiens
FSNPRALYL

SEQ ID NO: 139679 - protein, 9 aa, Homo Sapiens
FSPFHASVL

SEQ ID NO: 139680 - protein, 9 aa, Homo Sapiens
FSQPGLRSL

SEQ ID NO: 139681 - protein, 9 aa, Homo Sapiens
FSQPKVTEL

SEQ ID NO: 139682 - protein, 9 aa, Homo Sapiens
FSQPRHISV

SEQ ID NO: 139683 - protein, 9 aa, Homo Sapiens
FSSANSPFL

SEQ ID NO: 139684 - protein, 9 aa, Homo Sapiens
FSSDNIAVL

SEQ ID NO: 139685 - protein, 9 aa, Homo Sapiens
FSSDVTHEM

SEQ ID NO: 139686 - protein, 9 aa, Homo Sapiens
FSSEVTAAL

SEQ ID NO: 139687 - protein, 9 aa, Homo Sapiens
FSSPHLQML

SEQ ID NO: 139688 - protein, 9 aa, Homo Sapiens
FSSPSFQTL

SEQ ID NO: 139689 - protein, 9 aa, Homo Sapiens
FSSSSHLII

SEQ ID NO: 139690 - protein, 9 aa, Homo Sapiens
FSTDSPRLL

SEQ ID NO: 139691 - protein, 9 aa, Homo Sapiens
FSTGNFNVL

SEQ ID NO: 139692 - protein, 9 aa, Homo Sapiens
FSTLYGRVL

SEQ ID NO: 139693 - protein, 9 aa, Homo Sapiens
FSTPLNPLL

SEQ ID NO: 139694 - protein, 9 aa, Homo Sapiens
FSTSVVRPF

SEQ ID NO: 139695 - protein, 9 aa, Homo Sapiens
FSVEGQLEF

SEQ ID NO: 139696 - protein, 9 aa, Homo Sapiens
FSVENKWSL

SEQ ID NO: 139697 - protein, 9 aa, Homo Sapiens
FSVEQITAM

SEQ ID NO: 139698 - protein, 9 aa, Homo Sapiens
FSVKAGEAL

SEQ ID NO: 139699 - protein, 9 aa, Homo Sapiens
FSVNLFRTL

SEQ ID NO: 139700 - protein, 9 aa, Homo Sapiens
FSVPGGHNL

SEQ ID NO: 139701 - protein, 9 aa, Homo Sapiens
FSVPGSMKL

SEQ ID NO: 139702 - protein, 9 aa, Homo Sapiens
FSVPHTKSL

SEQ ID NO: 139703 - protein, 9 aa, Homo Sapiens
FSVPVAWTL

SEQ ID NO: 139704 - protein, 9 aa, Homo Sapiens
FSYAFPKAV

SEQ ID NO: 139705 - protein, 9 aa, Homo Sapiens
FSYAFPKEF

SEQ ID NO: 139706 - protein, 9 aa, Homo Sapiens
FSYEHFYVI

SEQ ID NO: 139707 - protein, 9 aa, Homo Sapiens
FSYEVSRSL

SEQ ID NO: 139708 - protein, 9 aa, Homo Sapiens
FSYGSGLAA

SEQ ID NO: 139709 - protein, 9 aa, Homo Sapiens
FSYHQFIHL

SEQ ID NO: 139710 - protein, 9 aa, Homo Sapiens
FSYITAVTL

SEQ ID NO: 139711 - protein, 9 aa, Homo Sapiens
FSYLNPQEL

SEQ ID NO: 139712 - protein, 9 aa, Homo Sapiens
FSYPAGTEL

SEQ ID NO: 139713 - protein, 9 aa, Homo Sapiens
FSYSCPKFL

SEQ ID NO: 139714 - protein, 9 aa, Homo Sapiens
FSYTGRVAV

SEQ ID NO: 139715 - protein, 9 aa, Homo Sapiens
FSYVTPRAF

SEQ ID NO: 139716 - protein, 9 aa, Homo Sapiens
FTADPLSLL

SEQ ID NO: 139717 - protein, 9 aa, Homo Sapiens
FTADVRSVL

SEQ ID NO: 139718 - protein, 9 aa, Homo Sapiens
FTAPATVSL

SEQ ID NO: 139719 - protein, 9 aa, Homo Sapiens
FTDASFLTL

SEQ ID NO: 139720 - protein, 9 aa, Homo Sapiens
FTDSGIHII

SEQ ID NO: 139721 - protein, 9 aa, Homo Sapiens
FTDTERLIG

SEQ ID NO: 139722 - protein, 9 aa, Homo Sapiens
FTEAGLKEL

SEQ ID NO: 139723 - protein, 9 aa, Homo Sapiens
FTEGNFAIL

SEQ ID NO: 139724 - protein, 9 aa, Homo Sapiens
FTEKSGRLL

SEQ ID NO: 139725 - protein, 9 aa, Homo Sapiens
FTFPDPPPL

SEQ ID NO: 139726 - protein, 9 aa, Homo Sapiens
FTFPGCRAL

SEQ ID NO: 139727 - protein, 9 aa, Homo Sapiens
FTGSTEIGR

SEQ ID NO: 139728 - protein, 9 aa, Homo Sapiens
FTIDGPLCL

SEQ ID NO: 139729 - protein, 9 aa, Homo Sapiens
FTIDIKSFL

SEQ ID NO: 139730 - protein, 9 aa, Homo Sapiens
FTIFRTISV

SEQ ID NO: 139731 - protein, 9 aa, Homo Sapiens
FTIPHTQEA

SEQ ID NO: 139732 - protein, 9 aa, Homo Sapiens
FTIVSPLDI

SEQ ID NO: 139733 - protein, 9 aa, Homo Sapiens
FTLDVMKEL

SEQ ID NO: 139734 - protein, 9 aa, Homo Sapiens
FTLSHITQL

SEQ ID NO: 139735 - protein, 9 aa, Homo Sapiens
FTMDPKLSA

SEQ ID NO: 139736 - protein, 9 aa, Homo Sapiens
FTMGGPAIS

SEQ ID NO: 139737 - protein, 9 aa, Homo Sapiens
FTMKTVLML

SEQ ID NO: 139738 - protein, 9 aa, Homo Sapiens
FTNDKIINL

SEQ ID NO: 139739 - protein, 9 aa, Homo Sapiens
FTNGQTVNL

SEQ ID NO: 139740 - protein, 9 aa, Homo Sapiens
FTNPWTKEL

SEQ ID NO: 139741 - protein, 9 aa, Homo Sapiens
FTNRTVLEL

SEQ ID NO: 139742 - protein, 9 aa, Homo Sapiens
FTSAAFHEL

SEQ ID NO: 139743 - protein, 9 aa, Homo Sapiens
FTSEKFLVM

SEQ ID NO: 139744 - protein, 9 aa, Homo Sapiens
FTSLPGSTM

SEQ ID NO: 139745 - protein, 9 aa, Homo Sapiens
FTSPFCLQV

SEQ ID NO: 139746 - protein, 9 aa, Homo Sapiens
FTSPPISCV

SEQ ID NO: 139747 - protein, 9 aa, Homo Sapiens
FTVMPGQTL

SEQ ID NO: 139748 - protein, 9 aa, Homo Sapiens
FTVNPKGEL

SEQ ID NO: 139749 - protein, 9 aa, Homo Sapiens
FTVPHTHVF

SEQ ID NO: 139750 - protein, 9 aa, Homo Sapiens
FTVPKNRSL

SEQ ID NO: 139751 - protein, 9 aa, Homo Sapiens
FTVPQIIEM

SEQ ID NO: 139752 - protein, 9 aa, Homo Sapiens
FTVPRVVAV

SEQ ID NO: 139753 - protein, 9 aa, Homo Sapiens
FTVTVPKDL

SEQ ID NO: 139754 - protein, 9 aa, Homo Sapiens
FTVTVPKEL

SEQ ID NO: 139755 - protein, 9 aa, Homo Sapiens
FTYGLHMIL

SEQ ID NO: 139756 - protein, 9 aa, Homo Sapiens
FTYNIPTCL

SEQ ID NO: 139757 - protein, 9 aa, Homo Sapiens
FVADVRLIF

SEQ ID NO: 139758 - protein, 9 aa, Homo Sapiens
FVAEGGPEL

SEQ ID NO: 139759 - protein, 9 aa, Homo Sapiens
FVALPGVAV

SEQ ID NO: 139760 - protein, 9 aa, Homo Sapiens
FVAPPTAAV

SEQ ID NO: 139761 - protein, 9 aa, Homo Sapiens
FVDEGIKTL

SEQ ID NO: 139762 - protein, 9 aa, Homo Sapiens
FVEEEEHFL

SEQ ID NO: 139763 - protein, 9 aa, Homo Sapiens
FVFETPFTL

SEQ ID NO: 139764 - protein, 9 aa, Homo Sapiens
FVFPGELLL

SEQ ID NO: 139765 - protein, 9 aa, Homo Sapiens
FVHAQCLEL

SEQ ID NO: 139766 - protein, 9 aa, Homo Sapiens
FVHDLVLYL

SEQ ID NO: 139767 - protein, 9 aa, Homo Sapiens
FVHPKPVSL

SEQ ID NO: 139768 - protein, 9 aa, Homo Sapiens
FVIDLQTRL

SEQ ID NO: 139769 - protein, 9 aa, Homo Sapiens
FVIETARQL

SEQ ID NO: 139770 - protein, 9 aa, Homo Sapiens
FVIGNGKNL

SEQ ID NO: 139771 - protein, 9 aa, Homo Sapiens
FVIPVVQAL

SEQ ID NO: 139772 - protein, 9 aa, Homo Sapiens
FVIQPFSPL

SEQ ID NO: 139773 - protein, 9 aa, Homo Sapiens
FVMAPTSFL

SEQ ID NO: 139774 - protein, 9 aa, Homo Sapiens
FVMEGVKNL

SEQ ID NO: 139775 - protein, 9 aa, Homo Sapiens
FVMETFVHL

SEQ ID NO: 139776 - protein, 9 aa, Homo Sapiens
FVNPHVSSF

SEQ ID NO: 139777 - protein, 9 aa, Homo Sapiens
FVNPSLRVL

SEQ ID NO: 139778 - protein, 9 aa, Homo Sapiens
FVNPVQVVL

SEQ ID NO: 139779 - protein, 9 aa, Homo Sapiens
FVPGTTAVL

SEQ ID NO: 139780 - protein, 9 aa, Homo Sapiens
FVQFASQEI

SEQ ID NO: 139781 - protein, 9 aa, Homo Sapiens
FVSPLVKYL

SEQ ID NO: 139782 - protein, 9 aa, Homo Sapiens
FVSSFMSEL

SEQ ID NO: 139783 - protein, 9 aa, Homo Sapiens
FVTEEIIPL

SEQ ID NO: 139784 - protein, 9 aa, Homo Sapiens
FVTKPNSAL

SEQ ID NO: 139785 - protein, 9 aa, Homo Sapiens
FVTSSHLQL

SEQ ID NO: 139786 - protein, 9 aa, Homo Sapiens
FVVERQPCM

SEQ ID NO: 139787 - protein, 9 aa, Homo Sapiens
FVVETQPCM

SEQ ID NO: 139788 - protein, 9 aa, Homo Sapiens
FVVPNQKEL

SEQ ID NO: 139789 - protein, 9 aa, Homo Sapiens
FVVPNQKRL

SEQ ID NO: 139790 - protein, 9 aa, Homo Sapiens
FVVPYGTPL

SEQ ID NO: 139791 - protein, 9 aa, Homo Sapiens
FVYENPISL

SEQ ID NO: 139792 - protein, 9 aa, Homo Sapiens
FVYGESVEL

SEQ ID NO: 139793 - protein, 9 aa, Homo Sapiens
FVYPFGATL

SEQ ID NO: 139794 - protein, 9 aa, Homo Sapiens
FYILTSKEL

SEQ ID NO: 139795 - protein, 9 aa, Homo Sapiens
FYVPFAKAL

SEQ ID NO: 139796 - protein, 9 aa, Homo Sapiens
GAAAWARPL

SEQ ID NO: 139797 - protein, 9 aa, Homo Sapiens
GAAPCRLAL

SEQ ID NO: 139798 - protein, 9 aa, Homo Sapiens
GAAVPIYVI

SEQ ID NO: 139799 - protein, 9 aa, Homo Sapiens
GAFQPGRPL

SEQ ID NO: 139800 - protein, 9 aa, Homo Sapiens
GAGPVLEAF

SEQ ID NO: 139801 - protein, 9 aa, Homo Sapiens
GAHFSVSSL

SEQ ID NO: 139802 - protein, 9 aa, Homo Sapiens
GAIARPACL

SEQ ID NO: 139803 - protein, 9 aa, Homo Sapiens
GAIPAFISL

SEQ ID NO: 139804 - protein, 9 aa, Homo Sapiens
GALAVFPSL

SEQ ID NO: 139805 - protein, 9 aa, Homo Sapiens
GALFISPAL

SEQ ID NO: 139806 - protein, 9 aa, Homo Sapiens
GALPYFSEM

SEQ ID NO: 139807 - protein, 9 aa, Homo Sapiens
GASPIGPTL

SEQ ID NO: 139808 - protein, 9 aa, Homo Sapiens
GATPVFIPL

SEQ ID NO: 139809 - protein, 9 aa, Homo Sapiens
GATPVSLAL

SEQ ID NO: 139810 - protein, 9 aa, Homo Sapiens
GAVDPLLAL

SEQ ID NO: 139811 - protein, 9 aa, Homo Sapiens
GAVEKGVPL

SEQ ID NO: 139812 - protein, 9 aa, Homo Sapiens
GAVPIFIEL

SEQ ID NO: 139813 - protein, 9 aa, Homo Sapiens
GAVSPFGML

SEQ ID NO: 139814 - protein, 9 aa, Homo Sapiens
GAYKYIQEL

SEQ ID NO: 139815 - protein, 9 aa, Homo Sapiens
GAYVPSLAL

SEQ ID NO: 139816 - protein, 9 aa, Homo Sapiens
GDVFYLHSR

SEQ ID NO: 139817 - protein, 9 aa, Homo Sapiens
GFAGDDAPR

SEQ ID NO: 139818 - protein, 9 aa, Homo Sapiens
GIGTVPVGR

SEQ ID NO: 139819 - protein, 9 aa, Homo Sapiens
GIIDPGSTV

SEQ ID NO: 139820 - protein, 9 aa, Homo Sapiens
GIIHVISRP

SEQ ID NO: 139821 - protein, 9 aa, Homo Sapiens
GIIRPGTAF

SEQ ID NO: 139822 - protein, 9 aa, Homo Sapiens
GILAIFRAL

SEQ ID NO: 139823 - protein, 9 aa, Homo Sapiens
GPPPPGKPQ

SEQ ID NO: 139824 - protein, 9 aa, Homo Sapiens
GQLNADLRK

SEQ ID NO: 139825 - protein, 9 aa, Homo Sapiens
GSTTVFHSL

SEQ ID NO: 139826 - protein, 9 aa, Homo Sapiens
GTAPPTLAL

SEQ ID NO: 139827 - protein, 9 aa, Homo Sapiens
GTIPWFMEI

SEQ ID NO: 139828 - protein, 9 aa, Homo Sapiens
GVIKVFNDM

SEQ ID NO: 139829 - protein, 9 aa, Homo Sapiens
HAAHIISEL

SEQ ID NO: 139830 - protein, 9 aa, Homo Sapiens
HAASVFLTL

SEQ ID NO: 139831 - protein, 9 aa, Homo Sapiens
HACGVIATI

SEQ ID NO: 139832 - protein, 9 aa, Homo Sapiens
HADDSFLVL

SEQ ID NO: 139833 - protein, 9 aa, Homo Sapiens
HAFWGGSVV

SEQ ID NO: 139834 - protein, 9 aa, Homo Sapiens
HAIMRSPQM

SEQ ID NO: 139835 - protein, 9 aa, Homo Sapiens
HAIPPTLAM

SEQ ID NO: 139836 - protein, 9 aa, Homo Sapiens
HAMQFPAEL

SEQ ID NO: 139837 - protein, 9 aa, Homo Sapiens
HAMVILLTL

SEQ ID NO: 139838 - protein, 9 aa, Homo Sapiens
HASDRIIAL

SEQ ID NO: 139839 - protein, 9 aa, Homo Sapiens
HAVGPSTSL

SEQ ID NO: 139840 - protein, 9 aa, Homo Sapiens
HAVHVALVL

SEQ ID NO: 139841 - protein, 9 aa, Homo Sapiens
HAVSDPSIL

SEQ ID NO: 139842 - protein, 9 aa, Homo Sapiens
HAWSGALEM

SEQ ID NO: 139843 - protein, 9 aa, Homo Sapiens
HIIAGAGEL

SEQ ID NO: 139844 - protein, 9 aa, Homo Sapiens
HIIEDPCTL

SEQ ID NO: 139845 - protein, 9 aa, Homo Sapiens
HLDEAIHVL

SEQ ID NO: 139846 - protein, 9 aa, Homo Sapiens
HSALPNQSL

SEQ ID NO: 139847 - protein, 9 aa, Homo Sapiens
HSDEYIKFL

SEQ ID NO: 139848 - protein, 9 aa, Homo Sapiens
HSHLLKTPL

SEQ ID NO: 139849 - protein, 9 aa, Homo Sapiens
HSIGSYFTL

SEQ ID NO: 139850 - protein, 9 aa, Homo Sapiens
HSIIPRGSL

SEQ ID NO: 139851 - protein, 9 aa, Homo Sapiens
HSLLPASNL

SEQ ID NO: 139852 - protein, 9 aa, Homo Sapiens
HTIVPGQVL

SEQ ID NO: 139853 - protein, 9 aa, Homo Sapiens
HTSEHFSFL

SEQ ID NO: 139854 - protein, 9 aa, Homo Sapiens
HVFIGGTPL

SEQ ID NO: 139855 - protein, 9 aa, Homo Sapiens
HVLEPLSSL

SEQ ID NO: 139856 - protein, 9 aa, Homo Sapiens
HVMKAMQSL

SEQ ID NO: 139857 - protein, 9 aa, Homo Sapiens
IAAGIFNDL

SEQ ID NO: 139858 - protein, 9 aa, Homo Sapiens
IAAGLYLLL

SEQ ID NO: 139859 - protein, 9 aa, Homo Sapiens
IAAMPLISL

SEQ ID NO: 139860 - protein, 9 aa, Homo Sapiens
IAAPFTSKL

SEQ ID NO: 139861 - protein, 9 aa, Homo Sapiens
IAAPNMKAM

SEQ ID NO: 139862 - protein, 9 aa, Homo Sapiens
IAAPTSSAL

SEQ ID NO: 139863 - protein, 9 aa, Homo Sapiens
IAAVPATAM

SEQ ID NO: 139864 - protein, 9 aa, Homo Sapiens
IAAVTDIPL

SEQ ID NO: 139865 - protein, 9 aa, Homo Sapiens
IADGVFRFL

SEQ ID NO: 139866 - protein, 9 aa, Homo Sapiens
IADLVSKEL

SEQ ID NO: 139867 - protein, 9 aa, Homo Sapiens
IADNVFLFL

SEQ ID NO: 139868 - protein, 9 aa, Homo Sapiens
IADPFFRSA

SEQ ID NO: 139869 - protein, 9 aa, Homo Sapiens
IADPNIAKL

SEQ ID NO: 139870 - protein, 9 aa, Homo Sapiens
IADSGLKIL

SEQ ID NO: 139871 - protein, 9 aa, Homo Sapiens
IAEMVRHAL

SEQ ID NO: 139872 - protein, 9 aa, Homo Sapiens
IAFPKAEEL

SEQ ID NO: 139873 - protein, 9 aa, Homo Sapiens
IAFPTSISV

SEQ ID NO: 139874 - protein, 9 aa, Homo Sapiens
IAFQYSTVL

SEQ ID NO: 139875 - protein, 9 aa, Homo Sapiens
IAIAPNGAL

SEQ ID NO: 139876 - protein, 9 aa, Homo Sapiens
IAIDGGKVL

SEQ ID NO: 139877 - protein, 9 aa, Homo Sapiens
IAIEALTQL

SEQ ID NO: 139878 - protein, 9 aa, Homo Sapiens
IAIEIYLKL

SEQ ID NO: 139879 - protein, 9 aa, Homo Sapiens
IAIGSQPVL

SEQ ID NO: 139880 - protein, 9 aa, Homo Sapiens
IAIIPSKKL

SEQ ID NO: 139881 - protein, 9 aa, Homo Sapiens
IAIKFGSAL

SEQ ID NO: 139882 - protein, 9 aa, Homo Sapiens
IAIKYSRTL

SEQ ID NO: 139883 - protein, 9 aa, Homo Sapiens
IAINISRNL

SEQ ID NO: 139884 - protein, 9 aa, Homo Sapiens
IAIPFGTAL

SEQ ID NO: 139885 - protein, 9 aa, Homo Sapiens
IAIPFLIKL

SEQ ID NO: 139886 - protein, 9 aa, Homo Sapiens
IAIPVTQEL

SEQ ID NO: 139887 - protein, 9 aa, Homo Sapiens
IAIPVTVAF

SEQ ID NO: 139888 - protein, 9 aa, Homo Sapiens
IAISRMKFL

SEQ ID NO: 139889 - protein, 9 aa, Homo Sapiens
IAISRTPVL

SEQ ID NO: 139890 - protein, 9 aa, Homo Sapiens
IALGEFSTL

SEQ ID NO: 139891 - protein, 9 aa, Homo Sapiens
IALGLCNSI

SEQ ID NO: 139892 - protein, 9 aa, Homo Sapiens
IAMGMAQAL

SEQ ID NO: 139893 - protein, 9 aa, Homo Sapiens
IANAVVKEL

SEQ ID NO: 139894 - protein, 9 aa, Homo Sapiens
IAQDFKTDL

SEQ ID NO: 139895 - protein, 9 aa, Homo Sapiens
IAQGSYIAL

SEQ ID NO: 139896 - protein, 9 aa, Homo Sapiens
IAQPVRSFL

SEQ ID NO: 139897 - protein, 9 aa, Homo Sapiens
IASAIVNEL

SEQ ID NO: 139898 - protein, 9 aa, Homo Sapiens
IASIHSFEL

SEQ ID NO: 139899 - protein, 9 aa, Homo Sapiens
IASPPSLIL

SEQ ID NO: 139900 - protein, 9 aa, Homo Sapiens
IASPVIAAV

SEQ ID NO: 139901 - protein, 9 aa, Homo Sapiens
IASPVQPVL

SEQ ID NO: 139902 - protein, 9 aa, Homo Sapiens
IATEIILEI

SEQ ID NO: 139903 - protein, 9 aa, Homo Sapiens
IATLAITTL

SEQ ID NO: 139904 - protein, 9 aa, Homo Sapiens
IAVAITEAL

SEQ ID NO: 139905 - protein, 9 aa, Homo Sapiens
IAVANAQEL

SEQ ID NO: 139906 - protein, 9 aa, Homo Sapiens
IAVEPGNQW

SEQ ID NO: 139907 - protein, 9 aa, Homo Sapiens
IAVGVGAQL

SEQ ID NO: 139908 - protein, 9 aa, Homo Sapiens
IAVPDPSVL

SEQ ID NO: 139909 - protein, 9 aa, Homo Sapiens
IAVPEARFL

SEQ ID NO: 139910 - protein, 9 aa, Homo Sapiens
IAWPPPTEL

SEQ ID NO: 139911 - protein, 9 aa, Homo Sapiens
IAYDVTYSL

SEQ ID NO: 139912 - protein, 9 aa, Homo Sapiens
IAYIRDLAL

SEQ ID NO: 139913 - protein, 9 aa, Homo Sapiens
IAYPKAVTM

SEQ ID NO: 139914 - protein, 9 aa, Homo Sapiens
IGIDHIKEL

SEQ ID NO: 139915 - protein, 9 aa, Homo Sapiens
IGNPHHVSL

SEQ ID NO: 139916 - protein, 9 aa, Homo Sapiens
IGYSSPLTL

SEQ ID NO: 139917 - protein, 9 aa, Homo Sapiens
IIEPSLRQL

SEQ ID NO: 139918 - protein, 9 aa, Homo Sapiens
IIINPSSSL

SEQ ID NO: 139919 - protein, 9 aa, Homo Sapiens
IIIPNPAAL

SEQ ID NO: 139920 - protein, 9 aa, Homo Sapiens
IIITPTREL

SEQ ID NO: 139921 - protein, 9 aa, Homo Sapiens
IITPAFAEL

SEQ ID NO: 139922 - protein, 9 aa, Homo Sapiens
IITTVGPEL

SEQ ID NO: 139923 - protein, 9 aa, Homo Sapiens
IIVDPAREL

SEQ ID NO: 139924 - protein, 9 aa, Homo Sapiens
IIVGNPKAL

SEQ ID NO: 139925 - protein, 9 aa, Homo Sapiens
IIYTAKISL

SEQ ID NO: 139926 - protein, 9 aa, Homo Sapiens
IPVTELRYF

SEQ ID NO: 139927 - protein, 9 aa, Homo Sapiens
ISAETFTAL

SEQ ID NO: 139928 - protein, 9 aa, Homo Sapiens
ISDNAAKIL

SEQ ID NO: 139929 - protein, 9 aa, Homo Sapiens
ISEENFRVM

SEQ ID NO: 139930 - protein, 9 aa, Homo Sapiens
ISGGKPLEV

SEQ ID NO: 139931 - protein, 9 aa, Homo Sapiens
ISIDRFLAV

SEQ ID NO: 139932 - protein, 9 aa, Homo Sapiens
ISIHVGQAG

SEQ ID NO: 139933 - protein, 9 aa, Homo Sapiens
ISILQQIEL

SEQ ID NO: 139934 - protein, 9 aa, Homo Sapiens
ISMIPAKCL

SEQ ID NO: 139935 - protein, 9 aa, Homo Sapiens
ISNPNSIIL

SEQ ID NO: 139936 - protein, 9 aa, Homo Sapiens
ISSPVVTSL

SEQ ID NO: 139937 - protein, 9 aa, Homo Sapiens
ISTEVNPKL

SEQ ID NO: 139938 - protein, 9 aa, Homo Sapiens
ISTNSHPIL

SEQ ID NO: 139939 - protein, 9 aa, Homo Sapiens
ISVASFQEL

SEQ ID NO: 139940 - protein, 9 aa, Homo Sapiens
ISVQPSSSL

SEQ ID NO: 139941 - protein, 9 aa, Homo Sapiens
ITAPPGTAA

SEQ ID NO: 139942 - protein, 9 aa, Homo Sapiens
ITAPPSRVL

SEQ ID NO: 139943 - protein, 9 aa, Homo Sapiens
ITDPQQLQL

SEQ ID NO: 139944 - protein, 9 aa, Homo Sapiens
ITIKPVLSL

SEQ ID NO: 139945 - protein, 9 aa, Homo Sapiens
ITISPLQEL

SEQ ID NO: 139946 - protein, 9 aa, Homo Sapiens
ITLHVFWEL

SEQ ID NO: 139947 - protein, 9 aa, Homo Sapiens
ITSDPGLSL

SEQ ID NO: 139948 - protein, 9 aa, Homo Sapiens
IVAEPGAVL

SEQ ID NO: 139949 - protein, 9 aa, Homo Sapiens
IVIDGSGAL

SEQ ID NO: 139950 - protein, 9 aa, Homo Sapiens
IVIDPKNPL

SEQ ID NO: 139951 - protein, 9 aa, Homo Sapiens
IVMEHVVFL

SEQ ID NO: 139952 - protein, 9 aa, Homo Sapiens
IVMPNILVL

SEQ ID NO: 139953 - protein, 9 aa, Homo Sapiens
IVNGHTLLV

SEQ ID NO: 139954 - protein, 9 aa, Homo Sapiens
IVVAPSQTL

SEQ ID NO: 139955 - protein, 9 aa, Homo Sapiens
IVYGSFRSL

SEQ ID NO: 139956 - protein, 9 aa, Homo Sapiens
KAAHFFSTL

SEQ ID NO: 139957 - protein, 9 aa, Homo Sapiens
KAASVRPVL

SEQ ID NO: 139958 - protein, 9 aa, Homo Sapiens
KACDYIQEL

SEQ ID NO: 139959 - protein, 9 aa, Homo Sapiens
KADMNVHLL

SEQ ID NO: 139960 - protein, 9 aa, Homo Sapiens
KAFNWFSTL

SEQ ID NO: 139961 - protein, 9 aa, Homo Sapiens
KAIDFAASL

SEQ ID NO: 139962 - protein, 9 aa, Homo Sapiens
KAIDLMNAL

SEQ ID NO: 139963 - protein, 9 aa, Homo Sapiens
KAIEVLLTL

SEQ ID NO: 139964 - protein, 9 aa, Homo Sapiens
KAIGLFISF

SEQ ID NO: 139965 - protein, 9 aa, Homo Sapiens
KAIRPYHAL

SEQ ID NO: 139966 - protein, 9 aa, Homo Sapiens
KAISRWSSL

SEQ ID NO: 139967 - protein, 9 aa, Homo Sapiens
KALSIFNEL

SEQ ID NO: 139968 - protein, 9 aa, Homo Sapiens
KAMELIREL

SEQ ID NO: 139969 - protein, 9 aa, Homo Sapiens
KAMEYMFGW

SEQ ID NO: 139970 - protein, 9 aa, Homo Sapiens
KAMLRSLPI

SEQ ID NO: 139971 - protein, 9 aa, Homo Sapiens
KANPALYVL

SEQ ID NO: 139972 - protein, 9 aa, Homo Sapiens
KATPQVPVL

SEQ ID NO: 139973 - protein, 9 aa, Homo Sapiens
KAVPQSLEL

SEQ ID NO: 139974 - protein, 9 aa, Homo Sapiens
KAYERGISL

SEQ ID NO: 139975 - protein, 9 aa, Homo Sapiens
KINEAFIEM

SEQ ID NO: 139976 - protein, 9 aa, Homo Sapiens
KITEDFRAL

SEQ ID NO: 139977 - protein, 9 aa, Homo Sapiens
KSIPSFSSL

SEQ ID NO: 139978 - protein, 9 aa, Homo Sapiens
LAAARLAAA

SEQ ID NO: 139979 - protein, 9 aa, Homo Sapiens
LAADCAHEL

SEQ ID NO: 139980 - protein, 9 aa, Homo Sapiens
LAAFPTTCL

SEQ ID NO: 139981 - protein, 9 aa, Homo Sapiens
LAAGHLVQL

SEQ ID NO: 139982 - protein, 9 aa, Homo Sapiens
LAAGPVGSL

SEQ ID NO: 139983 - protein, 9 aa, Homo Sapiens
LAAGVVSAM

SEQ ID NO: 139984 - protein, 9 aa, Homo Sapiens
LAAHLGSAL

SEQ ID NO: 139985 - protein, 9 aa, Homo Sapiens
LAAPIMLDL

SEQ ID NO: 139986 - protein, 9 aa, Homo Sapiens
LAAPSNLSM

SEQ ID NO: 139987 - protein, 9 aa, Homo Sapiens
LAAPSPAAL

SEQ ID NO: 139988 - protein, 9 aa, Homo Sapiens
LAAPVISVL

SEQ ID NO: 139989 - protein, 9 aa, Homo Sapiens
LAARASLDL

SEQ ID NO: 139990 - protein, 9 aa, Homo Sapiens
LAASVFTCL

SEQ ID NO: 139991 - protein, 9 aa, Homo Sapiens
LAATFIRSL

SEQ ID NO: 139992 - protein, 9 aa, Homo Sapiens
LAAVAHSPL

SEQ ID NO: 139993 - protein, 9 aa, Homo Sapiens
LACGKARVL

SEQ ID NO: 139994 - protein, 9 aa, Homo Sapiens
LACGVAKVL

SEQ ID NO: 139995 - protein, 9 aa, Homo Sapiens
LACGYLRNL

SEQ ID NO: 139996 - protein, 9 aa, Homo Sapiens
LACLHIATL

SEQ ID NO: 139997 - protein, 9 aa, Homo Sapiens
LACPLLRQL

SEQ ID NO: 139998 - protein, 9 aa, Homo Sapiens
LADDSVRSL

SEQ ID NO: 139999 - protein, 9 aa, Homo Sapiens
LADHTVHVL

SEQ ID NO: 140000 - protein, 9 aa, Homo Sapiens
LADPVFRTL

SEQ ID NO: 140001 - protein, 9 aa, Homo Sapiens
LADQKVHML

SEQ ID NO: 140002 - protein, 9 aa, Homo Sapiens
LADTTFRTI

SEQ ID NO: 140003 - protein, 9 aa, Homo Sapiens
LADVKVHIL

SEQ ID NO: 140004 - protein, 9 aa, Homo Sapiens
LAEAGVRLL

SEQ ID NO: 140005 - protein, 9 aa, Homo Sapiens
LAFEGPILL

SEQ ID NO: 140006 - protein, 9 aa, Homo Sapiens
LAFGSGMGL

SEQ ID NO: 140007 - protein, 9 aa, Homo Sapiens
LAFLGSQSL

SEQ ID NO: 140008 - protein, 9 aa, Homo Sapiens
LAFPGEMLL

SEQ ID NO: 140009 - protein, 9 aa, Homo Sapiens
LAFPSPEKL

SEQ ID NO: 140010 - protein, 9 aa, Homo Sapiens
LAFPTGCSL

SEQ ID NO: 140011 - protein, 9 aa, Homo Sapiens
LAFSRALEL

SEQ ID NO: 140012 - protein, 9 aa, Homo Sapiens
LAFTKSISL

SEQ ID NO: 140013 - protein, 9 aa, Homo Sapiens
LAGPDHLSL

SEQ ID NO: 140014 - protein, 9 aa, Homo Sapiens
LAGPPGPEL

SEQ ID NO: 140015 - protein, 9 aa, Homo Sapiens
LAHPNIIAL

SEQ ID NO: 140016 - protein, 9 aa, Homo Sapiens
LAHPYFESL

SEQ ID NO: 140017 - protein, 9 aa, Homo Sapiens
LAHVVITQL

SEQ ID NO: 140018 - protein, 9 aa, Homo Sapiens
LAIASGIYL

SEQ ID NO: 140019 - protein, 9 aa, Homo Sapiens
LAIDAIHQL

SEQ ID NO: 140020 - protein, 9 aa, Homo Sapiens
LAIESANEL

SEQ ID NO: 140021 - protein, 9 aa, Homo Sapiens
LAIFVICQL

SEQ ID NO: 140022 - protein, 9 aa, Homo Sapiens
LAIGPCKSL

SEQ ID NO: 140023 - protein, 9 aa, Homo Sapiens
LAIGSAATL

SEQ ID NO: 140024 - protein, 9 aa, Homo Sapiens
LAIHGMETL

SEQ ID NO: 140025 - protein, 9 aa, Homo Sapiens
LAIIPHVTI

SEQ ID NO: 140026 - protein, 9 aa, Homo Sapiens
LAIKPGTSV

SEQ ID NO: 140027 - protein, 9 aa, Homo Sapiens
LAIPFAITI

SEQ ID NO: 140028 - protein, 9 aa, Homo Sapiens
LAIPVFLTL

SEQ ID NO: 140029 - protein, 9 aa, Homo Sapiens
LAIQIYQQL

SEQ ID NO: 140030 - protein, 9 aa, Homo Sapiens
LAITGGVTL

SEQ ID NO: 140031 - protein, 9 aa, Homo Sapiens
LAITTEHTL

SEQ ID NO: 140032 - protein, 9 aa, Homo Sapiens
LAIVPVNTL

SEQ ID NO: 140033 - protein, 9 aa, Homo Sapiens
LALAIAQEL

SEQ ID NO: 140034 - protein, 9 aa, Homo Sapiens
LALDHLHSL

SEQ ID NO: 140035 - protein, 9 aa, Homo Sapiens
LALELHQEL

SEQ ID NO: 140036 - protein, 9 aa, Homo Sapiens
LALETTNSL

SEQ ID NO: 140037 - protein, 9 aa, Homo Sapiens
LALFLKLHL

SEQ ID NO: 140038 - protein, 9 aa, Homo Sapiens
LALFPGVAL

SEQ ID NO: 140039 - protein, 9 aa, Homo Sapiens
LALIIMKIL

SEQ ID NO: 140040 - protein, 9 aa, Homo Sapiens
LALTRSSSL

SEQ ID NO: 140041 - protein, 9 aa, Homo Sapiens
LAMEPTPEL

SEQ ID NO: 140042 - protein, 9 aa, Homo Sapiens
LAMLRSLDL

SEQ ID NO: 140043 - protein, 9 aa, Homo Sapiens
LAMPGETVL

SEQ ID NO: 140044 - protein, 9 aa, Homo Sapiens
LAMRPLASL

SEQ ID NO: 140045 - protein, 9 aa, Homo Sapiens
LANALTSAL

SEQ ID NO: 140046 - protein, 9 aa, Homo Sapiens
LANEHNVAL

SEQ ID NO: 140047 - protein, 9 aa, Homo Sapiens
LANEPSVAL

SEQ ID NO: 140048 - protein, 9 aa, Homo Sapiens
LANERLMTL

SEQ ID NO: 140049 - protein, 9 aa, Homo Sapiens
LANGQTKVL

SEQ ID NO: 140050 - protein, 9 aa, Homo Sapiens
LANLHITAL

SEQ ID NO: 140051 - protein, 9 aa, Homo Sapiens
LANPHELSL

SEQ ID NO: 140052 - protein, 9 aa, Homo Sapiens
LANPTTSAL

SEQ ID NO: 140053 - protein, 9 aa, Homo Sapiens
LAQDIFKEL

SEQ ID NO: 140054 - protein, 9 aa, Homo Sapiens
LAQGDMKQL

SEQ ID NO: 140055 - protein, 9 aa, Homo Sapiens
LAQHTMLTL

SEQ ID NO: 140056 - protein, 9 aa, Homo Sapiens
LAQPQMMVV

SEQ ID NO: 140057 - protein, 9 aa, Homo Sapiens
LAQQAILSL

SEQ ID NO: 140058 - protein, 9 aa, Homo Sapiens
LAQVSGLEM

SEQ ID NO: 140059 - protein, 9 aa, Homo Sapiens
LARPASAAL

SEQ ID NO: 140060 - protein, 9 aa, Homo Sapiens
LASAVISVL

SEQ ID NO: 140061 - protein, 9 aa, Homo Sapiens
LASHILTAL

SEQ ID NO: 140062 - protein, 9 aa, Homo Sapiens
LASPESLEL

SEQ ID NO: 140063 - protein, 9 aa, Homo Sapiens
LASPPWRVL

SEQ ID NO: 140064 - protein, 9 aa, Homo Sapiens
LASPSTSIL

SEQ ID NO: 140065 - protein, 9 aa, Homo Sapiens
LASPVFARL

SEQ ID NO: 140066 - protein, 9 aa, Homo Sapiens
LASPVSPEL

SEQ ID NO: 140067 - protein, 9 aa, Homo Sapiens
LATAAALTY

SEQ ID NO: 140068 - protein, 9 aa, Homo Sapiens
LATASSPKF

SEQ ID NO: 140069 - protein, 9 aa, Homo Sapiens
LATDFIQSL

SEQ ID NO: 140070 - protein, 9 aa, Homo Sapiens
LATGAAMVL

SEQ ID NO: 140071 - protein, 9 aa, Homo Sapiens
LATGHFMSV

SEQ ID NO: 140072 - protein, 9 aa, Homo Sapiens
LATHPGISF

SEQ ID NO: 140073 - protein, 9 aa, Homo Sapiens
LATIHLPYL

SEQ ID NO: 140074 - protein, 9 aa, Homo Sapiens
LATLIHQVL

SEQ ID NO: 140075 - protein, 9 aa, Homo Sapiens
LATPVDLKL

SEQ ID NO: 140076 - protein, 9 aa, Homo Sapiens
LATRAIPEL

SEQ ID NO: 140077 - protein, 9 aa, Homo Sapiens
LATRSFPQL

SEQ ID NO: 140078 - protein, 9 aa, Homo Sapiens
LATSHMLEL

SEQ ID NO: 140079 - protein, 9 aa, Homo Sapiens
LATTVRPVF

SEQ ID NO: 140080 - protein, 9 aa, Homo Sapiens
LATYGSIAL

SEQ ID NO: 140081 - protein, 9 aa, Homo Sapiens
LAVAGATSL

SEQ ID NO: 140082 - protein, 9 aa, Homo Sapiens
LAVDKSASL

SEQ ID NO: 140083 - protein, 9 aa, Homo Sapiens
LAVEAVLRL

SEQ ID NO: 140084 - protein, 9 aa, Homo Sapiens
LAVEKAAEL

SEQ ID NO: 140085 - protein, 9 aa, Homo Sapiens
LAVEPGSNL

SEQ ID NO: 140086 - protein, 9 aa, Homo Sapiens
LAVGLTSCF

SEQ ID NO: 140087 - protein, 9 aa, Homo Sapiens
LAVHIAHSL

SEQ ID NO: 140088 - protein, 9 aa, Homo Sapiens
LAVPDMSSL

SEQ ID NO: 140089 - protein, 9 aa, Homo Sapiens
LAVPIFVAL

SEQ ID NO: 140090 - protein, 9 aa, Homo Sapiens
LAVTDTGAL

SEQ ID NO: 140091 - protein, 9 aa, Homo Sapiens
LAVVVTKEM

SEQ ID NO: 140092 - protein, 9 aa, Homo Sapiens
LAYEPFSTL

SEQ ID NO: 140093 - protein, 9 aa, Homo Sapiens
LAYHLAVVL

SEQ ID NO: 140094 - protein, 9 aa, Homo Sapiens
LAYIAHPKL

SEQ ID NO: 140095 - protein, 9 aa, Homo Sapiens
LAYLQRIAL

SEQ ID NO: 140096 - protein, 9 aa, Homo Sapiens
LAYMNHIMV

SEQ ID NO: 140097 - protein, 9 aa, Homo Sapiens
LAYPFQSLL

SEQ ID NO: 140098 - protein, 9 aa, Homo Sapiens
LAYPGSATI

SEQ ID NO: 140099 - protein, 9 aa, Homo Sapiens
LDNISFPKQ

SEQ ID NO: 140100 - protein, 9 aa, Homo Sapiens
LFMPRSTEF

SEQ ID NO: 140101 - protein, 9 aa, Homo Sapiens
LFVGKHHPL

SEQ ID NO: 140102 - protein, 9 aa, Homo Sapiens
LGAPPGPQL

SEQ ID NO: 140103 - protein, 9 aa, Homo Sapiens
LGIAGITGA

SEQ ID NO: 140104 - protein, 9 aa, Homo Sapiens
LGIPHSFAL

SEQ ID NO: 140105 - protein, 9 aa, Homo Sapiens
LGIPIITVL

SEQ ID NO: 140106 - protein, 9 aa, Homo Sapiens
LIAYMLLTI

SEQ ID NO: 140107 - protein, 9 aa, Homo Sapiens
LIDVARTSL

SEQ ID NO: 140108 - protein, 9 aa, Homo Sapiens
LIICPLSVL

SEQ ID NO: 140109 - protein, 9 aa, Homo Sapiens
LIISPTREL

SEQ ID NO: 140110 - protein, 9 aa, Homo Sapiens
LIIVPLSTL

SEQ ID NO: 140111 - protein, 9 aa, Homo Sapiens
LIMDAYNSL

SEQ ID NO: 140112 - protein, 9 aa, Homo Sapiens
LINANMMVL

SEQ ID NO: 140113 - protein, 9 aa, Homo Sapiens
LIQKPSHPL

SEQ ID NO: 140114 - protein, 9 aa, Homo Sapiens
LIVDLCADK

SEQ ID NO: 140115 - protein, 9 aa, Homo Sapiens
LIVEPSREL

SEQ ID NO: 140116 - protein, 9 aa, Homo Sapiens
LIYDGKVEM

SEQ ID NO: 140117 - protein, 9 aa, Homo Sapiens
LIYGTPRAA

SEQ ID NO: 140118 - protein, 9 aa, Homo Sapiens
LLAALWMIL

SEQ ID NO: 140119 - protein, 9 aa, Homo Sapiens
LLAMPVMVL

SEQ ID NO: 140120 - protein, 9 aa, Homo Sapiens
LLAQPGEAL

SEQ ID NO: 140121 - protein, 9 aa, Homo Sapiens
LLETGHRAL

SEQ ID NO: 140122 - protein, 9 aa, Homo Sapiens
LLFMLVLTV

SEQ ID NO: 140123 - protein, 9 aa, Homo Sapiens
LLLPAGIAL

SEQ ID NO: 140124 - protein, 9 aa, Homo Sapiens
LLPPPMKEL

SEQ ID NO: 140125 - protein, 9 aa, Homo Sapiens
LMMDPLTGL

SEQ ID NO: 140126 - protein, 9 aa, Homo Sapiens
LQSVQVFGR

SEQ ID NO: 140127 - protein, 9 aa, Homo Sapiens
LSAPIHTQM

SEQ ID NO: 140128 - protein, 9 aa, Homo Sapiens
LSAPSLHAL

SEQ ID NO: 140129 - protein, 9 aa, Homo Sapiens
LSDLHAHKL

SEQ ID NO: 140130 - protein, 9 aa, Homo Sapiens
LSDPFYRTL

SEQ ID NO: 140131 - protein, 9 aa, Homo Sapiens
LSDPQVHTV

SEQ ID NO: 140132 - protein, 9 aa, Homo Sapiens
LSDPTYREL

SEQ ID NO: 140133 - protein, 9 aa, Homo Sapiens
LSEENFKVL

SEQ ID NO: 140134 - protein, 9 aa, Homo Sapiens
LSEPMVHEL

SEQ ID NO: 140135 - protein, 9 aa, Homo Sapiens
LSFTHPTSF

SEQ ID NO: 140136 - protein, 9 aa, Homo Sapiens
LSHSLLVTL

SEQ ID NO: 140137 - protein, 9 aa, Homo Sapiens
LSIDLFHVL

SEQ ID NO: 140138 - protein, 9 aa, Homo Sapiens
LSIPSFQAL

SEQ ID NO: 140139 - protein, 9 aa, Homo Sapiens
LSIRHLMEL

SEQ ID NO: 140140 - protein, 9 aa, Homo Sapiens
LSISPRLTL

SEQ ID NO: 140141 - protein, 9 aa, Homo Sapiens
LSKGPGLEV

SEQ ID NO: 140142 - protein, 9 aa, Homo Sapiens
LSMVPITSL

SEQ ID NO: 140143 - protein, 9 aa, Homo Sapiens
LSNHVFNAL

SEQ ID NO: 140144 - protein, 9 aa, Homo Sapiens
LSQEDVKTL

SEQ ID NO: 140145 - protein, 9 aa, Homo Sapiens
LSQPTPATL

SEQ ID NO: 140146 - protein, 9 aa, Homo Sapiens
LSQQPFLSL

SEQ ID NO: 140147 - protein, 9 aa, Homo Sapiens
LSQVPMSAL

SEQ ID NO: 140148 - protein, 9 aa, Homo Sapiens
LSSSVIREL

SEQ ID NO: 140149 - protein, 9 aa, Homo Sapiens
LSTLPTSTL

SEQ ID NO: 140150 - protein, 9 aa, Homo Sapiens
LSTPFGQAL

SEQ ID NO: 140151 - protein, 9 aa, Homo Sapiens
LSTTVQPNL

SEQ ID NO: 140152 - protein, 9 aa, Homo Sapiens
LSVAPQQSL

SEQ ID NO: 140153 - protein, 9 aa, Homo Sapiens
LSVEIVHEL

SEQ ID NO: 140154 - protein, 9 aa, Homo Sapiens
LSYGPGPSL

SEQ ID NO: 140155 - protein, 9 aa, Homo Sapiens
LTDGHPLTL

SEQ ID NO: 140156 - protein, 9 aa, Homo Sapiens
LTDPDIHVL

SEQ ID NO: 140157 - protein, 9 aa, Homo Sapiens
LTHGINFAV

SEQ ID NO: 140158 - protein, 9 aa, Homo Sapiens
LTHTAVVPL

SEQ ID NO: 140159 - protein, 9 aa, Homo Sapiens
LTMAPGSTL

SEQ ID NO: 140160 - protein, 9 aa, Homo Sapiens
LTTASLPLL

SEQ ID NO: 140161 - protein, 9 aa, Homo Sapiens
LTTEVHPEL

SEQ ID NO: 140162 - protein, 9 aa, Homo Sapiens
LTVDPQGAL

SEQ ID NO: 140163 - protein, 9 aa, Homo Sapiens
LTVEPGASL

SEQ ID NO: 140164 - protein, 9 aa, Homo Sapiens
LTYMPSVSL

SEQ ID NO: 140165 - protein, 9 aa, Homo Sapiens
LVFPGFFEL

SEQ ID NO: 140166 - protein, 9 aa, Homo Sapiens
LVIGRVLEL

SEQ ID NO: 140167 - protein, 9 aa, Homo Sapiens
LVITASQSL

SEQ ID NO: 140168 - protein, 9 aa, Homo Sapiens
LVLAPTREL

SEQ ID NO: 140169 - protein, 9 aa, Homo Sapiens
LVLTPTREL

SEQ ID NO: 140170 - protein, 9 aa, Homo Sapiens
LVNGKSLEL

SEQ ID NO: 140171 - protein, 9 aa, Homo Sapiens
LVTDIQPVL

SEQ ID NO: 140172 - protein, 9 aa, Homo Sapiens
LVVYPWTQR

SEQ ID NO: 140173 - protein, 9 aa, Homo Sapiens
LYDASFETK

SEQ ID NO: 140174 - protein, 9 aa, Homo Sapiens
LYDATYETK

SEQ ID NO: 140175 - protein, 9 aa, Homo Sapiens
MAAMVLTSL

SEQ ID NO: 140176 - protein, 9 aa, Homo Sapiens
MAANVIPVL

SEQ ID NO: 140177 - protein, 9 aa, Homo Sapiens
MAAPLVLVL

SEQ ID NO: 140178 - protein, 9 aa, Homo Sapiens
MAARVGAFL

SEQ ID NO: 140179 - protein, 9 aa, Homo Sapiens
MADPNIRFL

SEQ ID NO: 140180 - protein, 9 aa, Homo Sapiens
MAFDPTSTL

SEQ ID NO: 140181 - protein, 9 aa, Homo Sapiens
MAIHAAAVL

SEQ ID NO: 140182 - protein, 9 aa, Homo Sapiens
MAISKPRNL

SEQ ID NO: 140183 - protein, 9 aa, Homo Sapiens
MAIVGGMAL

SEQ ID NO: 140184 - protein, 9 aa, Homo Sapiens
MAKRFAYPL

SEQ ID NO: 140185 - protein, 9 aa, Homo Sapiens
MALGHVIVL

SEQ ID NO: 140186 - protein, 9 aa, Homo Sapiens
MALPPCHAL

SEQ ID NO: 140187 - protein, 9 aa, Homo Sapiens
MAMAYGSSL

SEQ ID NO: 140188 - protein, 9 aa, Homo Sapiens
MANGAVIHL

SEQ ID NO: 140189 - protein, 9 aa, Homo Sapiens
MANPQMQQL

SEQ ID NO: 140190 - protein, 9 aa, Homo Sapiens
MANPTALLL

SEQ ID NO: 140191 - protein, 9 aa, Homo Sapiens
MAPLKMLAL

SEQ ID NO: 140192 - protein, 9 aa, Homo Sapiens
MASPMSIPT

SEQ ID NO: 140193 - protein, 9 aa, Homo Sapiens
MATAEAQSL

SEQ ID NO: 140194 - protein, 9 aa, Homo Sapiens
MATESILHF

SEQ ID NO: 140195 - protein, 9 aa, Homo Sapiens
MAVAFVLSL

SEQ ID NO: 140196 - protein, 9 aa, Homo Sapiens
MAVGGGLAV

SEQ ID NO: 140197 - protein, 9 aa, Homo Sapiens
MAYFPAISL

SEQ ID NO: 140198 - protein, 9 aa, Homo Sapiens
MAYPSLVAM

SEQ ID NO: 140199 - protein, 9 aa, Homo Sapiens
MIIENFEAL

SEQ ID NO: 140200 - protein, 9 aa, Homo Sapiens
MSDTTFKAL

SEQ ID NO: 140201 - protein, 9 aa, Homo Sapiens
MSLPSGSSL

SEQ ID NO: 140202 - protein, 9 aa, Homo Sapiens
MSMDASPEL

SEQ ID NO: 140203 - protein, 9 aa, Homo Sapiens
MSSPLSKEL

SEQ ID NO: 140204 - protein, 9 aa, Homo Sapiens
MSVEVRQTL

SEQ ID NO: 140205 - protein, 9 aa, Homo Sapiens
MSVHLSPCF

SEQ ID NO: 140206 - protein, 9 aa, Homo Sapiens
MSVQPTVSL

SEQ ID NO: 140207 - protein, 9 aa, Homo Sapiens
MTIEPFISL

SEQ ID NO: 140208 - protein, 9 aa, Homo Sapiens
MTTAFIHAL

SEQ ID NO: 140209 - protein, 9 aa, Homo Sapiens
MVIVPTREL

SEQ ID NO: 140210 - protein, 9 aa, Homo Sapiens
MVMEKPSPL

SEQ ID NO: 140211 - protein, 9 aa, Homo Sapiens
MVNPVIYAL

SEQ ID NO: 140212 - protein, 9 aa, Homo Sapiens
MVVGTGTSL

SEQ ID NO: 140213 - protein, 9 aa, Homo Sapiens
NAATSFQVL

SEQ ID NO: 140214 - protein, 9 aa, Homo Sapiens
NADPIAKYL

SEQ ID NO: 140215 - protein, 9 aa, Homo Sapiens
NADPNMKLF

SEQ ID NO: 140216 - protein, 9 aa, Homo Sapiens
NAFSGVMML

SEQ ID NO: 140217 - protein, 9 aa, Homo Sapiens
NAIEGGTQL

SEQ ID NO: 140218 - protein, 9 aa, Homo Sapiens
NAINITSAL

SEQ ID NO: 140219 - protein, 9 aa, Homo Sapiens
NAIREVLEL

SEQ ID NO: 140220 - protein, 9 aa, Homo Sapiens
NAISIHHAL

SEQ ID NO: 140221 - protein, 9 aa, Homo Sapiens
NALFHASTL

SEQ ID NO: 140222 - protein, 9 aa, Homo Sapiens
NAMECALHL

SEQ ID NO: 140223 - protein, 9 aa, Homo Sapiens
NASPVISSV

SEQ ID NO: 140224 - protein, 9 aa, Homo Sapiens
NAVPLFLRL

SEQ ID NO: 140225 - protein, 9 aa, Homo Sapiens
NAVWALSNL

SEQ ID NO: 140226 - protein, 9 aa, Homo Sapiens
NGIFPGTPL

SEQ ID NO: 140227 - protein, 9 aa, Homo Sapiens
NIYAANPVI

SEQ ID NO: 140228 - protein, 9 aa, Homo Sapiens
NRDVLELIK

SEQ ID NO: 140229 - protein, 9 aa, Homo Sapiens
NSNPVIAEL

SEQ ID NO: 140230 - protein, 9 aa, Homo Sapiens
NTIDPSHPM

SEQ ID NO: 140231 - protein, 9 aa, Homo Sapiens
NVLDHFSEL

SEQ ID NO: 140232 - protein, 9 aa, Homo Sapiens
QAIENAHVL

SEQ ID NO: 140233 - protein, 9 aa, Homo Sapiens
QAIPVTSEL

SEQ ID NO: 140234 - protein, 9 aa, Homo Sapiens
QAIRAGLEL

SEQ ID NO: 140235 - protein, 9 aa, Homo Sapiens
QAISVVGSL

SEQ ID NO: 140236 - protein, 9 aa, Homo Sapiens
QALPWISIL

SEQ ID NO: 140237 - protein, 9 aa, Homo Sapiens
QAMPTLIEL

SEQ ID NO: 140238 - protein, 9 aa, Homo Sapiens
QSISPGSRL

SEQ ID NO: 140239 - protein, 9 aa, Homo Sapiens
QSITPCLAL

SEQ ID NO: 140240 - protein, 9 aa, Homo Sapiens
QTLEDFKEL

SEQ ID NO: 140241 - protein, 9 aa, Homo Sapiens
QTQHPRMPL

SEQ ID NO: 140242 - protein, 9 aa, Homo Sapiens
RAHSEPLAL

SEQ ID NO: 140243 - protein, 9 aa, Homo Sapiens
RAIDFSPYL

SEQ ID NO: 140244 - protein, 9 aa, Homo Sapiens
RAIEIYTDM

SEQ ID NO: 140245 - protein, 9 aa, Homo Sapiens
RAIELATTL

SEQ ID NO: 140246 - protein, 9 aa, Homo Sapiens
RAIQFYLEF

SEQ ID NO: 140247 - protein, 9 aa, Homo Sapiens
RALDHYLTL

SEQ ID NO: 140248 - protein, 9 aa, Homo Sapiens
RALEHFTDL

SEQ ID NO: 140249 - protein, 9 aa, Homo Sapiens
RALNVFYYL

SEQ ID NO: 140250 - protein, 9 aa, Homo Sapiens
RATPHFSGL

SEQ ID NO: 140251 - protein, 9 aa, Homo Sapiens
RAVAPTMSL

SEQ ID NO: 140252 - protein, 9 aa, Homo Sapiens
RAVEVSAEL

SEQ ID NO: 140253 - protein, 9 aa, Homo Sapiens
RAVPVGSGL

SEQ ID NO: 140254 - protein, 9 aa, Homo Sapiens
RAYAKFYTL

SEQ ID NO: 140255 - protein, 9 aa, Homo Sapiens
RGTKVILHL

SEQ ID NO: 140256 - protein, 9 aa, Homo Sapiens
RIPSFVTEL

SEQ ID NO: 140257 - protein, 9 aa, Homo Sapiens
RTIGFFYTL

SEQ ID NO: 140258 - protein, 9 aa, Homo Sapiens
RTMEIFQLL

SEQ ID NO: 140259 - protein, 9 aa, Homo Sapiens
RTVDLFPVL

SEQ ID NO: 140260 - protein, 9 aa, Homo Sapiens
RVIDVGSEW

SEQ ID NO: 140261 - protein, 9 aa, Homo Sapiens
SAACPGLQL

SEQ ID NO: 140262 - protein, 9 aa, Homo Sapiens
SAAENFLVL

SEQ ID NO: 140263 - protein, 9 aa, Homo Sapiens
SAAFPGASL

SEQ ID NO: 140264 - protein, 9 aa, Homo Sapiens
SAAGPGFSL

SEQ ID NO: 140265 - protein, 9 aa, Homo Sapiens
SAAMPGASL

SEQ ID NO: 140266 - protein, 9 aa, Homo Sapiens
SAAMVFSAL

SEQ ID NO: 140267 - protein, 9 aa, Homo Sapiens
SAANIQPIF

SEQ ID NO: 140268 - protein, 9 aa, Homo Sapiens
SAAPEGVPL

SEQ ID NO: 140269 - protein, 9 aa, Homo Sapiens
SAAPPGLEA

SEQ ID NO: 140270 - protein, 9 aa, Homo Sapiens
SAAPRTVAL

SEQ ID NO: 140271 - protein, 9 aa, Homo Sapiens
SAAPTFLLL

SEQ ID NO: 140272 - protein, 9 aa, Homo Sapiens
SAAQPGVAF

SEQ ID NO: 140273 - protein, 9 aa, Homo Sapiens
SAASLYPVL

SEQ ID NO: 140274 - protein, 9 aa, Homo Sapiens
SACDALRTL

SEQ ID NO: 140275 - protein, 9 aa, Homo Sapiens
SADSLEHVL

SEQ ID NO: 140276 - protein, 9 aa, Homo Sapiens
SAFDHFASV

SEQ ID NO: 140277 - protein, 9 aa, Homo Sapiens
SAFDRCATL

SEQ ID NO: 140278 - protein, 9 aa, Homo Sapiens
SAFGYFITA

SEQ ID NO: 140279 - protein, 9 aa, Homo Sapiens
SAFPFPVTV

SEQ ID NO: 140280 - protein, 9 aa, Homo Sapiens
SAFPHLRVL

SEQ ID NO: 140281 - protein, 9 aa, Homo Sapiens
SAHSHFISL

SEQ ID NO: 140282 - protein, 9 aa, Homo Sapiens
SAIAEPSSL

SEQ ID NO: 140283 - protein, 9 aa, Homo Sapiens
SAIASTKVM

SEQ ID NO: 140284 - protein, 9 aa, Homo Sapiens
SAIDRIFTL

SEQ ID NO: 140285 - protein, 9 aa, Homo Sapiens
SAIFNFQSL

SEQ ID NO: 140286 - protein, 9 aa, Homo Sapiens
SAIFPDVAL

SEQ ID NO: 140287 - protein, 9 aa, Homo Sapiens
SAIGLPVCL

SEQ ID NO: 140288 - protein, 9 aa, Homo Sapiens
SAIGPFSGL

SEQ ID NO: 140289 - protein, 9 aa, Homo Sapiens
SAIGRAMEL

SEQ ID NO: 140290 - protein, 9 aa, Homo Sapiens
SAIGYIHSL

SEQ ID NO: 140291 - protein, 9 aa, Homo Sapiens
SAIHVLASL

SEQ ID NO: 140292 - protein, 9 aa, Homo Sapiens
SAIIFETPL

SEQ ID NO: 140293 - protein, 9 aa, Homo Sapiens
SAILRSPAF

SEQ ID NO: 140294 - protein, 9 aa, Homo Sapiens
SAINQVEAL

SEQ ID NO: 140295 - protein, 9 aa, Homo Sapiens
SAIPHPLIM

SEQ ID NO: 140296 - protein, 9 aa, Homo Sapiens
SAIPWGISA

SEQ ID NO: 140297 - protein, 9 aa, Homo Sapiens
SAIYGALTL

SEQ ID NO: 140298 - protein, 9 aa, Homo Sapiens
SALEKFVEL

SEQ ID NO: 140299 - protein, 9 aa, Homo Sapiens
SALEKSLAV

SEQ ID NO: 140300 - protein, 9 aa, Homo Sapiens
SALGKSPWL

SEQ ID NO: 140301 - protein, 9 aa, Homo Sapiens
SALGVGLAL

SEQ ID NO: 140302 - protein, 9 aa, Homo Sapiens
SALHYAVEL

SEQ ID NO: 140303 - protein, 9 aa, Homo Sapiens
SALNVRLFL

SEQ ID NO: 140304 - protein, 9 aa, Homo Sapiens
SAMEVVPAL

SEQ ID NO: 140305 - protein, 9 aa, Homo Sapiens
SAMKAVTEL

SEQ ID NO: 140306 - protein, 9 aa, Homo Sapiens
SAMKHMVIL

SEQ ID NO: 140307 - protein, 9 aa, Homo Sapiens
SANIRLTAM

SEQ ID NO: 140308 - protein, 9 aa, Homo Sapiens
SAQGKPLAL

SEQ ID NO: 140309 - protein, 9 aa, Homo Sapiens
SASPASLLL

SEQ ID NO: 140310 - protein, 9 aa, Homo Sapiens
SASPPGPTL

SEQ ID NO: 140311 - protein, 9 aa, Homo Sapiens
SATELMNIL

SEQ ID NO: 140312 - protein, 9 aa, Homo Sapiens
SATQVYTIL

SEQ ID NO: 140313 - protein, 9 aa, Homo Sapiens
SAVDFIRTL

SEQ ID NO: 140314 - protein, 9 aa, Homo Sapiens
SAVDLPVTL

SEQ ID NO: 140315 - protein, 9 aa, Homo Sapiens
SAVDVHINM

SEQ ID NO: 140316 - protein, 9 aa, Homo Sapiens
SAVEPKTAL

SEQ ID NO: 140317 - protein, 9 aa, Homo Sapiens
SAVGHVFSL

SEQ ID NO: 140318 - protein, 9 aa, Homo Sapiens
SAVGQFVSL

SEQ ID NO: 140319 - protein, 9 aa, Homo Sapiens
SAVHWVATL

SEQ ID NO: 140320 - protein, 9 aa, Homo Sapiens
SAVPCALLL

SEQ ID NO: 140321 - protein, 9 aa, Homo Sapiens
SAVQASLSL

SEQ ID NO: 140322 - protein, 9 aa, Homo Sapiens
SAVSHFFSL

SEQ ID NO: 140323 - protein, 9 aa, Homo Sapiens
SAVSIFHEL

SEQ ID NO: 140324 - protein, 9 aa, Homo Sapiens
SAVSSFVFL

SEQ ID NO: 140325 - protein, 9 aa, Homo Sapiens
SAVWNSPPL

SEQ ID NO: 140326 - protein, 9 aa, Homo Sapiens
SAYAGFLAL

SEQ ID NO: 140327 - protein, 9 aa, Homo Sapiens
SAYPLSVEW

SEQ ID NO: 140328 - protein, 9 aa, Homo Sapiens
SAYQRYYSL

SEQ ID NO: 140329 - protein, 9 aa, Homo Sapiens
SGIERMGPL

SEQ ID NO: 140330 - protein, 9 aa, Homo Sapiens
SIALPSKPA

SEQ ID NO: 140331 - protein, 9 aa, Homo Sapiens
SIIAMGNTL

SEQ ID NO: 140332 - protein, 9 aa, Homo Sapiens
SIIGSARSL

SEQ ID NO: 140333 - protein, 9 aa, Homo Sapiens
SIIPPLFTV

SEQ ID NO: 140334 - protein, 9 aa, Homo Sapiens
SILSHFQSL

SEQ ID NO: 140335 - protein, 9 aa, Homo Sapiens
SILTTHTTL

SEQ ID NO: 140336 - protein, 9 aa, Homo Sapiens
SIQVPGMQM

SEQ ID NO: 140337 - protein, 9 aa, Homo Sapiens
SIVAPGGAL

SEQ ID NO: 140338 - protein, 9 aa, Homo Sapiens
SIVKPYLTL

SEQ ID NO: 140339 - protein, 9 aa, Homo Sapiens
SIYSRFVQL

SEQ ID NO: 140340 - protein, 9 aa, Homo Sapiens
SLIEQTTAL

SEQ ID NO: 140341 - protein, 9 aa, Homo Sapiens
SLVPPGASL

SEQ ID NO: 140342 - protein, 9 aa, Homo Sapiens
SNVYPSKPL

SEQ ID NO: 140343 - protein, 9 aa, Homo Sapiens
SQYPFPVTL

SEQ ID NO: 140344 - protein, 9 aa, Homo Sapiens
SSAPPLSEL

SEQ ID NO: 140345 - protein, 9 aa, Homo Sapiens
SSAVPGTAL

SEQ ID NO: 140346 - protein, 9 aa, Homo Sapiens
SSCPLLRTL

SEQ ID NO: 140347 - protein, 9 aa, Homo Sapiens
SSIDPGLSI

SEQ ID NO: 140348 - protein, 9 aa, Homo Sapiens
SSIEHLTTL

SEQ ID NO: 140349 - protein, 9 aa, Homo Sapiens
SSMLPVMAL

SEQ ID NO: 140350 - protein, 9 aa, Homo Sapiens
SSMYPPHPL

SEQ ID NO: 140351 - protein, 9 aa, Homo Sapiens
SSSPAVLAL

SEQ ID NO: 140352 - protein, 9 aa, Homo Sapiens
SSTTVIPTL

SEQ ID NO: 140353 - protein, 9 aa, Homo Sapiens
STFSPSLAL

SEQ ID NO: 140354 - protein, 9 aa, Homo Sapiens
STLNRFSAL

SEQ ID NO: 140355 - protein, 9 aa, Homo Sapiens
STYHRFLTW

SEQ ID NO: 140356 - protein, 9 aa, Homo Sapiens
SVAKESIPL

SEQ ID NO: 140357 - protein, 9 aa, Homo Sapiens
SVIIPGMTL

SEQ ID NO: 140358 - protein, 9 aa, Homo Sapiens
SVIPPRTEL

SEQ ID NO: 140359 - protein, 9 aa, Homo Sapiens
SVIQHTNSL

SEQ ID NO: 140360 - protein, 9 aa, Homo Sapiens
SVISVVSYL

SEQ ID NO: 140361 - protein, 9 aa, Homo Sapiens
SVLDRPRAL

SEQ ID NO: 140362 - protein, 9 aa, Homo Sapiens
SVNGFISTL

SEQ ID NO: 140363 - protein, 9 aa, Homo Sapiens
SVVAVPLPL

SEQ ID NO: 140364 - protein, 9 aa, Homo Sapiens
SVVDVFAQL

SEQ ID NO: 140365 - protein, 9 aa, Homo Sapiens
SVVFHSTVI

SEQ ID NO: 140366 - protein, 9 aa, Homo Sapiens
TAAADFTAK

SEQ ID NO: 140367 - protein, 9 aa, Homo Sapiens
TAAAVGAVF

SEQ ID NO: 140368 - protein, 9 aa, Homo Sapiens
TAAFPFAAL

SEQ ID NO: 140369 - protein, 9 aa, Homo Sapiens
TAAPPAQPL

SEQ ID NO: 140370 - protein, 9 aa, Homo Sapiens
TAAPTIGVL

SEQ ID NO: 140371 - protein, 9 aa, Homo Sapiens
TAAPVPTTL

SEQ ID NO: 140372 - protein, 9 aa, Homo Sapiens
TAAPVVPEL

SEQ ID NO: 140373 - protein, 9 aa, Homo Sapiens
TAASPTIAL

SEQ ID NO: 140374 - protein, 9 aa, Homo Sapiens
TACAINKVL

SEQ ID NO: 140375 - protein, 9 aa, Homo Sapiens
TADGMVHLL

SEQ ID NO: 140376 - protein, 9 aa, Homo Sapiens
TAFHSSMAL

SEQ ID NO: 140377 - protein, 9 aa, Homo Sapiens
TAFPQRTEL

SEQ ID NO: 140378 - protein, 9 aa, Homo Sapiens
TAIAESPVI

SEQ ID NO: 140379 - protein, 9 aa, Homo Sapiens
TAIDRYLCL

SEQ ID NO: 140380 - protein, 9 aa, Homo Sapiens
TAIDWFHEW

SEQ ID NO: 140381 - protein, 9 aa, Homo Sapiens
TAIESTPTL

SEQ ID NO: 140382 - protein, 9 aa, Homo Sapiens
TAINHFFIW

SEQ ID NO: 140383 - protein, 9 aa, Homo Sapiens
TAIPCLLAL

SEQ ID NO: 140384 - protein, 9 aa, Homo Sapiens
TAIPISMVL

SEQ ID NO: 140385 - protein, 9 aa, Homo Sapiens
TAIPVTQEL

SEQ ID NO: 140386 - protein, 9 aa, Homo Sapiens
TAIRSGLEL

SEQ ID NO: 140387 - protein, 9 aa, Homo Sapiens
TAISLFYEL

SEQ ID NO: 140388 - protein, 9 aa, Homo Sapiens
TAISRYMEL

SEQ ID NO: 140389 - protein, 9 aa, Homo Sapiens
TAISTSPLL

SEQ ID NO: 140390 - protein, 9 aa, Homo Sapiens
TALNLFFKL

SEQ ID NO: 140391 - protein, 9 aa, Homo Sapiens
TALPRIFSL

SEQ ID NO: 140392 - protein, 9 aa, Homo Sapiens
TASPFFRAL

SEQ ID NO: 140393 - protein, 9 aa, Homo Sapiens
TASPVAVSL

SEQ ID NO: 140394 - protein, 9 aa, Homo Sapiens
TASPVIKAV

SEQ ID NO: 140395 - protein, 9 aa, Homo Sapiens
TAVAPNVAL

SEQ ID NO: 140396 - protein, 9 aa, Homo Sapiens
TAVENMPSL

SEQ ID NO: 140397 - protein, 9 aa, Homo Sapiens
TAVMPKVSL

SEQ ID NO: 140398 - protein, 9 aa, Homo Sapiens
TAVPYFSNL

SEQ ID NO: 140399 - protein, 9 aa, Homo Sapiens
TAVVPPMCL

SEQ ID NO: 140400 - protein, 9 aa, Homo Sapiens
TAYDNFVEL

SEQ ID NO: 140401 - protein, 9 aa, Homo Sapiens
TGIPGLEQL

SEQ ID NO: 140402 - protein, 9 aa, Homo Sapiens
TGIQPGTSL

SEQ ID NO: 140403 - protein, 9 aa, Homo Sapiens
TIDPIPHQL

SEQ ID NO: 140404 - protein, 9 aa, Homo Sapiens
TIDPNTRTL

SEQ ID NO: 140405 - protein, 9 aa, Homo Sapiens
TIIDKSKSV

SEQ ID NO: 140406 - protein, 9 aa, Homo Sapiens
TIIEATHVL

SEQ ID NO: 140407 - protein, 9 aa, Homo Sapiens
TIIPKVLAM

SEQ ID NO: 140408 - protein, 9 aa, Homo Sapiens
TIIRQNQAL

SEQ ID NO: 140409 - protein, 9 aa, Homo Sapiens
TIMPRGPTL

SEQ ID NO: 140410 - protein, 9 aa, Homo Sapiens
TITDIISAL

SEQ ID NO: 140411 - protein, 9 aa, Homo Sapiens
TIVDTGIGM

SEQ ID NO: 140412 - protein, 9 aa, Homo Sapiens
TIYDRFVHL

SEQ ID NO: 140413 - protein, 9 aa, Homo Sapiens
TIYHMFIAL

SEQ ID NO: 140414 - protein, 9 aa, Homo Sapiens
TMLSRENVG

SEQ ID NO: 140415 - protein, 9 aa, Homo Sapiens
TSSPSILTL

SEQ ID NO: 140416 - protein, 9 aa, Homo Sapiens
TSVPPGSAL

SEQ ID NO: 140417 - protein, 9 aa, Homo Sapiens
TTIKPGLAL

SEQ ID NO: 140418 - protein, 9 aa, Homo Sapiens
TTMVPTAAL

SEQ ID NO: 140419 - protein, 9 aa, Homo Sapiens
TVIPHLMAL

SEQ ID NO: 140420 - protein, 9 aa, Homo Sapiens
TVTTVILEV

SEQ ID NO: 140421 - protein, 9 aa, Homo Sapiens
VAAAHSVVL

SEQ ID NO: 140422 - protein, 9 aa, Homo Sapiens
VAADAVASL

SEQ ID NO: 140423 - protein, 9 aa, Homo Sapiens
VAAGVLCEL

SEQ ID NO: 140424 - protein, 9 aa, Homo Sapiens
VAAKKNVSI

SEQ ID NO: 140425 - protein, 9 aa, Homo Sapiens
VAALSGRPL

SEQ ID NO: 140426 - protein, 9 aa, Homo Sapiens
VAAPASLSL

SEQ ID NO: 140427 - protein, 9 aa, Homo Sapiens
VACGLNHTL

SEQ ID NO: 140428 - protein, 9 aa, Homo Sapiens
VADPVYRTF

SEQ ID NO: 140429 - protein, 9 aa, Homo Sapiens
VADPYVVIM

SEQ ID NO: 140430 - protein, 9 aa, Homo Sapiens
VAEAGLTIS

SEQ ID NO: 140431 - protein, 9 aa, Homo Sapiens
VAEENTRVL

SEQ ID NO: 140432 - protein, 9 aa, Homo Sapiens
VAFDKFWNM

SEQ ID NO: 140433 - protein, 9 aa, Homo Sapiens
VAFGPAFAL

SEQ ID NO: 140434 - protein, 9 aa, Homo Sapiens
VAFQHFQEL

SEQ ID NO: 140435 - protein, 9 aa, Homo Sapiens
VAFSPVTEL

SEQ ID NO: 140436 - protein, 9 aa, Homo Sapiens
VAGPALEAL

SEQ ID NO: 140437 - protein, 9 aa, Homo Sapiens
VAGPVGGSL

SEQ ID NO: 140438 - protein, 9 aa, Homo Sapiens
VAICRNLIL

SEQ ID NO: 140439 - protein, 9 aa, Homo Sapiens
VAIFPSPMM

SEQ ID NO: 140440 - protein, 9 aa, Homo Sapiens
VAIGPCRML

SEQ ID NO: 140441 - protein, 9 aa, Homo Sapiens
VAIIARTDL

SEQ ID NO: 140442 - protein, 9 aa, Homo Sapiens
VAIKAGTTL

SEQ ID NO: 140443 - protein, 9 aa, Homo Sapiens
VAILRHPTL

SEQ ID NO: 140444 - protein, 9 aa, Homo Sapiens
VAIPCYTTL

SEQ ID NO: 140445 - protein, 9 aa, Homo Sapiens
VAIQAVLSL

SEQ ID NO: 140446 - protein, 9 aa, Homo Sapiens
VAIQAVLTL

SEQ ID NO: 140447 - protein, 9 aa, Homo Sapiens
VALAWLHVL

SEQ ID NO: 140448 - protein, 9 aa, Homo Sapiens
VALCHLAEL

SEQ ID NO: 140449 - protein, 9 aa, Homo Sapiens
VALDFEQEM

SEQ ID NO: 140450 - protein, 9 aa, Homo Sapiens
VALGNMYEL

SEQ ID NO: 140451 - protein, 9 aa, Homo Sapiens
VALLRVTPF

SEQ ID NO: 140452 - protein, 9 aa, Homo Sapiens
VALLVTSGL

SEQ ID NO: 140453 - protein, 9 aa, Homo Sapiens
VALPASGWL

SEQ ID NO: 140454 - protein, 9 aa, Homo Sapiens
VALPMVLVL

SEQ ID NO: 140455 - protein, 9 aa, Homo Sapiens
VALPPGLAV

SEQ ID NO: 140456 - protein, 9 aa, Homo Sapiens
VALPVFLVI

SEQ ID NO: 140457 - protein, 9 aa, Homo Sapiens
VALPVVYSL

SEQ ID NO: 140458 - protein, 9 aa, Homo Sapiens
VALVVGHEL

SEQ ID NO: 140459 - protein, 9 aa, Homo Sapiens
VAMERVSVL

SEQ ID NO: 140460 - protein, 9 aa, Homo Sapiens
VAMYGGLVL

SEQ ID NO: 140461 - protein, 9 aa, Homo Sapiens
VANNRIITL

SEQ ID NO: 140462 - protein, 9 aa, Homo Sapiens
VANPEHMEM

SEQ ID NO: 140463 - protein, 9 aa, Homo Sapiens
VANPNSAIF

SEQ ID NO: 140464 - protein, 9 aa, Homo Sapiens
VANVPNTSL

SEQ ID NO: 140465 - protein, 9 aa, Homo Sapiens
VANVSLLAL

SEQ ID NO: 140466 - protein, 9 aa, Homo Sapiens
VAQELPTTL

SEQ ID NO: 140467 - protein, 9 aa, Homo Sapiens
VAQNSGLTL

SEQ ID NO: 140468 - protein, 9 aa, Homo Sapiens
VAQTWFRFL

SEQ ID NO: 140469 - protein, 9 aa, Homo Sapiens
VASAVCLRL

SEQ ID NO: 140470 - protein, 9 aa, Homo Sapiens
VASFPRTVL

SEQ ID NO: 140471 - protein, 9 aa, Homo Sapiens
VATAADLEL

SEQ ID NO: 140472 - protein, 9 aa, Homo Sapiens
VATDFFTVL

SEQ ID NO: 140473 - protein, 9 aa, Homo Sapiens
VATGVISTL

SEQ ID NO: 140474 - protein, 9 aa, Homo Sapiens
VATKIFQEL

SEQ ID NO: 140475 - protein, 9 aa, Homo Sapiens
VATQVGIEW

SEQ ID NO: 140476 - protein, 9 aa, Homo Sapiens
VAVDGINAL

SEQ ID NO: 140477 - protein, 9 aa, Homo Sapiens
VAVEPGAAV

SEQ ID NO: 140478 - protein, 9 aa, Homo Sapiens
VAVFPWHSL

SEQ ID NO: 140479 - protein, 9 aa, Homo Sapiens
VAVGSGLSW

SEQ ID NO: 140480 - protein, 9 aa, Homo Sapiens
VAVGVIKAV

SEQ ID NO: 140481 - protein, 9 aa, Homo Sapiens
VAVHVFSEF

SEQ ID NO: 140482 - protein, 9 aa, Homo Sapiens
VAVISGEAL

SEQ ID NO: 140483 - protein, 9 aa, Homo Sapiens
VAVPTLNAL

SEQ ID NO: 140484 - protein, 9 aa, Homo Sapiens
VAVPVAVTF

SEQ ID NO: 140485 - protein, 9 aa, Homo Sapiens
VAVQHFSLL

SEQ ID NO: 140486 - protein, 9 aa, Homo Sapiens
VAVQPGEQL

SEQ ID NO: 140487 - protein, 9 aa, Homo Sapiens
VAVSPSLDL

SEQ ID NO: 140488 - protein, 9 aa, Homo Sapiens
VAVSVLNAL

SEQ ID NO: 140489 - protein, 9 aa, Homo Sapiens
VAVVAGVAL

SEQ ID NO: 140490 - protein, 9 aa, Homo Sapiens
VAYLQAHAL

SEQ ID NO: 140491 - protein, 9 aa, Homo Sapiens
VAYMNPIAM

SEQ ID NO: 140492 - protein, 9 aa, Homo Sapiens
VAYPGIPKL

SEQ ID NO: 140493 - protein, 9 aa, Homo Sapiens
VAYVSSVAL

SEQ ID NO: 140494 - protein, 9 aa, Homo Sapiens
VAYWRQAGL

SEQ ID NO: 140495 - protein, 9 aa, Homo Sapiens
VEPEVAIHR

SEQ ID NO: 140496 - protein, 9 aa, Homo Sapiens
VFNTLQGGK

SEQ ID NO: 140497 - protein, 9 aa, Homo Sapiens
VGAPVGIAL

SEQ ID NO: 140498 - protein, 9 aa, Homo Sapiens
VGDPSVHLL

SEQ ID NO: 140499 - protein, 9 aa, Homo Sapiens
VGGVALSLS

SEQ ID NO: 140500 - protein, 9 aa, Homo Sapiens
VGVPVGSAL

SEQ ID NO: 140501 - protein, 9 aa, Homo Sapiens
VIAPNPAQL

SEQ ID NO: 140502 - protein, 9 aa, Homo Sapiens
VIDGEFKEL

SEQ ID NO: 140503 - protein, 9 aa, Homo Sapiens
VIHVPSPAL

SEQ ID NO: 140504 - protein, 9 aa, Homo Sapiens
VIIEKTYSL

SEQ ID NO: 140505 - protein, 9 aa, Homo Sapiens
VIIGSTHVL

SEQ ID NO: 140506 - protein, 9 aa, Homo Sapiens
VIIWARLAL

SEQ ID NO: 140507 - protein, 9 aa, Homo Sapiens
VIMGLSPIL

SEQ ID NO: 140508 - protein, 9 aa, Homo Sapiens
VIMPHNMYL

SEQ ID NO: 140509 - protein, 9 aa, Homo Sapiens
VINGHTLCL

SEQ ID NO: 140510 - protein, 9 aa, Homo Sapiens
VIPTNVPEL

SEQ ID NO: 140511 - protein, 9 aa, Homo Sapiens
VISLEGKPL

SEQ ID NO: 140512 - protein, 9 aa, Homo Sapiens
VIVTPLTEL

SEQ ID NO: 140513 - protein, 9 aa, Homo Sapiens
VIYPARISL

SEQ ID NO: 140514 - protein, 9 aa, Homo Sapiens
VNCFVNNNR

SEQ ID NO: 140515 - protein, 9 aa, Homo Sapiens
VNFTVDQIR

SEQ ID NO: 140516 - protein, 9 aa, Homo Sapiens
VSAGIQTSF

SEQ ID NO: 140517 - protein, 9 aa, Homo Sapiens
VSCPYVKTV

SEQ ID NO: 140518 - protein, 9 aa, Homo Sapiens
VSDFGGRSL

SEQ ID NO: 140519 - protein, 9 aa, Homo Sapiens
VSFPYVIAL

SEQ ID NO: 140520 - protein, 9 aa, Homo Sapiens
VSHPRYLEL

SEQ ID NO: 140521 - protein, 9 aa, Homo Sapiens
VSIDTVTVL

SEQ ID NO: 140522 - protein, 9 aa, Homo Sapiens
VSIGDSHCL

SEQ ID NO: 140523 - protein, 9 aa, Homo Sapiens
VSMPVFQSL

SEQ ID NO: 140524 - protein, 9 aa, Homo Sapiens
VTDHNLHEL

SEQ ID NO: 140525 - protein, 9 aa, Homo Sapiens
VTEECVHIL

SEQ ID NO: 140526 - protein, 9 aa, Homo Sapiens
VTIARAIEL

SEQ ID NO: 140527 - protein, 9 aa, Homo Sapiens
VTIPSGSTL

SEQ ID NO: 140528 - protein, 9 aa, Homo Sapiens
VTVPPGPSL

SEQ ID NO: 140529 - protein, 9 aa, Homo Sapiens
VTVQPSPYL

SEQ ID NO: 140530 - protein, 9 aa, Homo Sapiens
VTVRPGLAM

SEQ ID NO: 140531 - protein, 9 aa, Homo Sapiens
VVAPAGITL

SEQ ID NO: 140532 - protein, 9 aa, Homo Sapiens
VVEHPEFLK

SEQ ID NO: 140533 - protein, 9 aa, Homo Sapiens
VVIEPISEL

SEQ ID NO: 140534 - protein, 9 aa, Homo Sapiens
VVIGKMLIL

SEQ ID NO: 140535 - protein, 9 aa, Homo Sapiens
VVKPPGSSL

SEQ ID NO: 140536 - protein, 9 aa, Homo Sapiens
VVNGRVLEL

SEQ ID NO: 140537 - protein, 9 aa, Homo Sapiens
VVVAVGRAL

SEQ ID NO: 140538 - protein, 9 aa, Homo Sapiens
VVVDPIQSV

SEQ ID NO: 140539 - protein, 9 aa, Homo Sapiens
VVVQAISAL

SEQ ID NO: 140540 - protein, 9 aa, Homo Sapiens
VVVQPYNSL

SEQ ID NO: 140541 - protein, 9 aa, Homo Sapiens
WAEWGHREL

SEQ ID NO: 140542 - protein, 9 aa, Homo Sapiens
WAICPRDSL

SEQ ID NO: 140543 - protein, 9 aa, Homo Sapiens
WAMDLRPEL

SEQ ID NO: 140544 - protein, 9 aa, Homo Sapiens
WAQPGGAAF

SEQ ID NO: 140545 - protein, 9 aa, Homo Sapiens
WAVTGVSSL

SEQ ID NO: 140546 - protein, 9 aa, Homo Sapiens
WAYPRQVFI

SEQ ID NO: 140547 - protein, 9 aa, Homo Sapiens
WQNPHMLFL

SEQ ID NO: 140548 - protein, 9 aa, Homo Sapiens
YAAGAGLCV

SEQ ID NO: 140549 - protein, 9 aa, Homo Sapiens
YAAGAKLVL

SEQ ID NO: 140550 - protein, 9 aa, Homo Sapiens
YAAGVHSVL

SEQ ID NO: 140551 - protein, 9 aa, Homo Sapiens
YAALCGISL

SEQ ID NO: 140552 - protein, 9 aa, Homo Sapiens
YAANPGQLF

SEQ ID NO: 140553 - protein, 9 aa, Homo Sapiens
YAAPHFFHL

SEQ ID NO: 140554 - protein, 9 aa, Homo Sapiens
YAAPWFLTL

SEQ ID NO: 140555 - protein, 9 aa, Homo Sapiens
YAAQAHLKL

SEQ ID NO: 140556 - protein, 9 aa, Homo Sapiens
YAAYPLTEV

SEQ ID NO: 140557 - protein, 9 aa, Homo Sapiens
YACEKEVFL

SEQ ID NO: 140558 - protein, 9 aa, Homo Sapiens
YACPLPREA

SEQ ID NO: 140559 - protein, 9 aa, Homo Sapiens
YADGYSPPL

SEQ ID NO: 140560 - protein, 9 aa, Homo Sapiens
YADVGGKQF

SEQ ID NO: 140561 - protein, 9 aa, Homo Sapiens
YADVIVHRL

SEQ ID NO: 140562 - protein, 9 aa, Homo Sapiens
YAEMGTRTF

SEQ ID NO: 140563 - protein, 9 aa, Homo Sapiens
YAETIAHIL

SEQ ID NO: 140564 - protein, 9 aa, Homo Sapiens
YAEVGRVLL

SEQ ID NO: 140565 - protein, 9 aa, Homo Sapiens
YAFGGGCEL

SEQ ID NO: 140566 - protein, 9 aa, Homo Sapiens
YAFPKAVSV

SEQ ID NO: 140567 - protein, 9 aa, Homo Sapiens
YAFPKAVTV

SEQ ID NO: 140568 - protein, 9 aa, Homo Sapiens
YAFPKSITV

SEQ ID NO: 140569 - protein, 9 aa, Homo Sapiens
YAFPLAHSL

SEQ ID NO: 140570 - protein, 9 aa, Homo Sapiens
YAFSPRNSL

SEQ ID NO: 140571 - protein, 9 aa, Homo Sapiens
YAFVRPVIL

SEQ ID NO: 140572 - protein, 9 aa, Homo Sapiens
YAHLTPREL

SEQ ID NO: 140573 - protein, 9 aa, Homo Sapiens
YAHLTYVTL

SEQ ID NO: 140574 - protein, 9 aa, Homo Sapiens
YAIARFKFL

SEQ ID NO: 140575 - protein, 9 aa, Homo Sapiens
YAIDNPLHY

SEQ ID NO: 140576 - protein, 9 aa, Homo Sapiens
YAIESQLQL

SEQ ID NO: 140577 - protein, 9 aa, Homo Sapiens
YAIEVDPVL

SEQ ID NO: 140578 - protein, 9 aa, Homo Sapiens
YAIGLVMRL

SEQ ID NO: 140579 - protein, 9 aa, Homo Sapiens
YAIGNAPEL

SEQ ID NO: 140580 - protein, 9 aa, Homo Sapiens
YAIGVSHPL

SEQ ID NO: 140581 - protein, 9 aa, Homo Sapiens
YAIHGVLEV

SEQ ID NO: 140582 - protein, 9 aa, Homo Sapiens
YAINQPDVL

SEQ ID NO: 140583 - protein, 9 aa, Homo Sapiens
YAIPKFKHL

SEQ ID NO: 140584 - protein, 9 aa, Homo Sapiens
YAISKPEVL

SEQ ID NO: 140585 - protein, 9 aa, Homo Sapiens
YAISPGLDI

SEQ ID NO: 140586 - protein, 9 aa, Homo Sapiens
YAITRVLRL

SEQ ID NO: 140587 - protein, 9 aa, Homo Sapiens
YAITTLHNL

SEQ ID NO: 140588 - protein, 9 aa, Homo Sapiens
YAIVNFITF

SEQ ID NO: 140589 - protein, 9 aa, Homo Sapiens
YAKDDPLEF

SEQ ID NO: 140590 - protein, 9 aa, Homo Sapiens
YAKRPGIGL

SEQ ID NO: 140591 - protein, 9 aa, Homo Sapiens
YALDLSTFL

SEQ ID NO: 140592 - protein, 9 aa, Homo Sapiens
YALERLKVM

SEQ ID NO: 140593 - protein, 9 aa, Homo Sapiens
YALGALNHL

SEQ ID NO: 140594 - protein, 9 aa, Homo Sapiens
YALNHTLSV

SEQ ID NO: 140595 - protein, 9 aa, Homo Sapiens
YALPAGLSA

SEQ ID NO: 140596 - protein, 9 aa, Homo Sapiens
YALPKSLSV

SEQ ID NO: 140597 - protein, 9 aa, Homo Sapiens
YALTAIMKL

SEQ ID NO: 140598 - protein, 9 aa, Homo Sapiens
YALYVRDTL

SEQ ID NO: 140599 - protein, 9 aa, Homo Sapiens
YAMDELRSL

SEQ ID NO: 140600 - protein, 9 aa, Homo Sapiens
YAMDIVKGL

SEQ ID NO: 140601 - protein, 9 aa, Homo Sapiens
YANAKIYKL

SEQ ID NO: 140602 - protein, 9 aa, Homo Sapiens
YANAVLQAL

SEQ ID NO: 140603 - protein, 9 aa, Homo Sapiens
YANEVGEAF

SEQ ID NO: 140604 - protein, 9 aa, Homo Sapiens
YANSKAVTL

SEQ ID NO: 140605 - protein, 9 aa, Homo Sapiens
YANYYTREV

SEQ ID NO: 140606 - protein, 9 aa, Homo Sapiens
YAQIRTIAI

SEQ ID NO: 140607 - protein, 9 aa, Homo Sapiens
YAQLHSFTL

SEQ ID NO: 140608 - protein, 9 aa, Homo Sapiens
YAQLHSLTL

SEQ ID NO: 140609 - protein, 9 aa, Homo Sapiens
YASDFHNVL

SEQ ID NO: 140610 - protein, 9 aa, Homo Sapiens
YASNITSVL

SEQ ID NO: 140611 - protein, 9 aa, Homo Sapiens
YASSPGMSL

SEQ ID NO: 140612 - protein, 9 aa, Homo Sapiens
YATLFAQAL

SEQ ID NO: 140613 - protein, 9 aa, Homo Sapiens
YAVELFEGL

SEQ ID NO: 140614 - protein, 9 aa, Homo Sapiens
YAVGDVKCL

SEQ ID NO: 140615 - protein, 9 aa, Homo Sapiens
YAVGGYTRL

SEQ ID NO: 140616 - protein, 9 aa, Homo Sapiens
YAVHEGLGL

SEQ ID NO: 140617 - protein, 9 aa, Homo Sapiens
YAVMRAAEM

SEQ ID NO: 140618 - protein, 9 aa, Homo Sapiens
YAVNSQFTM

SEQ ID NO: 140619 - protein, 9 aa, Homo Sapiens
YAVTGDVKM

SEQ ID NO: 140620 - protein, 9 aa, Homo Sapiens
YAYEKPHVV

SEQ ID NO: 140621 - protein, 9 aa, Homo Sapiens
YAYETKDAL

SEQ ID NO: 140622 - protein, 9 aa, Homo Sapiens
YAYEWQRCL

SEQ ID NO: 140623 - protein, 9 aa, Homo Sapiens
YAYGQYNMP

SEQ ID NO: 140624 - protein, 9 aa, Homo Sapiens
YAYLKAIVL

SEQ ID NO: 140625 - protein, 9 aa, Homo Sapiens
YAYLYIRML

SEQ ID NO: 140626 - protein, 9 aa, Homo Sapiens
YAYPGVLLI

SEQ ID NO: 140627 - protein, 9 aa, Homo Sapiens
YAYTGRLEL

SEQ ID NO: 140628 - protein, 9 aa, Homo Sapiens
YAYTSRVIL

SEQ ID NO: 140629 - protein, 9 aa, Homo Sapiens
YGIEHALAL

SEQ ID NO: 140630 - protein, 9 aa, Homo Sapiens
YGINNIREL

SEQ ID NO: 140631 - protein, 9 aa, Homo Sapiens
YGITSPISL

SEQ ID NO: 140632 - protein, 9 aa, Homo Sapiens
YGLEPAHPL

SEQ ID NO: 140633 - protein, 9 aa, Homo Sapiens
YGNPNTLRL

SEQ ID NO: 140634 - protein, 9 aa, Homo Sapiens
YGSFVTRAL

SEQ ID NO: 140635 - protein, 9 aa, Homo Sapiens
YGSPNALVL

SEQ ID NO: 140636 - protein, 9 aa, Homo Sapiens
YGSPQSPQL

SEQ ID NO: 140637 - protein, 9 aa, Homo Sapiens
YGVTVFKAL

SEQ ID NO: 140638 - protein, 9 aa, Homo Sapiens
YGYEHILTL

SEQ ID NO: 140639 - protein, 9 aa, Homo Sapiens
YGYSNPKIL

SEQ ID NO: 140640 - protein, 9 aa, Homo Sapiens
YIDDVFHAL

SEQ ID NO: 140641 - protein, 9 aa, Homo Sapiens
YIDEGRLVL

SEQ ID NO: 140642 - protein, 9 aa, Homo Sapiens
YIFDNCHEL

SEQ ID NO: 140643 - protein, 9 aa, Homo Sapiens
YIIIPKSSL

SEQ ID NO: 140644 - protein, 9 aa, Homo Sapiens
YIIPVVLFL

SEQ ID NO: 140645 - protein, 9 aa, Homo Sapiens
YIIVPPLTL

SEQ ID NO: 140646 - protein, 9 aa, Homo Sapiens
YILDPKQAL

SEQ ID NO: 140647 - protein, 9 aa, Homo Sapiens
YILGKFFAL

SEQ ID NO: 140648 - protein, 9 aa, Homo Sapiens
YILPFSEVL

SEQ ID NO: 140649 - protein, 9 aa, Homo Sapiens
YIMDWMDEM

SEQ ID NO: 140650 - protein, 9 aa, Homo Sapiens
YINPRAVQL

SEQ ID NO: 140651 - protein, 9 aa, Homo Sapiens
YIPNKVLIL

SEQ ID NO: 140652 - protein, 9 aa, Homo Sapiens
YIQQKVRVL

SEQ ID NO: 140653 - protein, 9 aa, Homo Sapiens
YISAKPLEM

SEQ ID NO: 140654 - protein, 9 aa, Homo Sapiens
YITDFLARL

SEQ ID NO: 140655 - protein, 9 aa, Homo Sapiens
YITDLFQVL

SEQ ID NO: 140656 - protein, 9 aa, Homo Sapiens
YIVAVYHCM

SEQ ID NO: 140657 - protein, 9 aa, Homo Sapiens
YIVDHTIIM

SEQ ID NO: 140658 - protein, 9 aa, Homo Sapiens
YIVKWPLSL

SEQ ID NO: 140659 - protein, 9 aa, Homo Sapiens
YLAPHVRTL

SEQ ID NO: 140660 - protein, 9 aa, Homo Sapiens
YLFERIKEL

SEQ ID NO: 140661 - protein, 9 aa, Homo Sapiens
YLIARVMLL

SEQ ID NO: 140662 - protein, 9 aa, Homo Sapiens
YLIGVHASL

SEQ ID NO: 140663 - protein, 9 aa, Homo Sapiens
YLIPFSSKL

SEQ ID NO: 140664 - protein, 9 aa, Homo Sapiens
YLLDHFLSM

SEQ ID NO: 140665 - protein, 9 aa, Homo Sapiens
YLLDLHSYL

SEQ ID NO: 140666 - protein, 9 aa, Homo Sapiens
YLLEKSRIV

SEQ ID NO: 140667 - protein, 9 aa, Homo Sapiens
YLLEKSRVI

SEQ ID NO: 140668 - protein, 9 aa, Homo Sapiens
YLNGYIYIL

SEQ ID NO: 140669 - protein, 9 aa, Homo Sapiens
YLQIHPQEL

SEQ ID NO: 140670 - protein, 9 aa, Homo Sapiens
YLTAEILEL

SEQ ID NO: 140671 - protein, 9 aa, Homo Sapiens
YLTPLILTL

SEQ ID NO: 140672 - protein, 9 aa, Homo Sapiens
YLVPQARAL

SEQ ID NO: 140673 - protein, 9 aa, Homo Sapiens
YMIAHITGL

SEQ ID NO: 140674 - protein, 9 aa, Homo Sapiens
YNIQKESTL

SEQ ID NO: 140675 - protein, 9 aa, Homo Sapiens
YQEKGVRVL

SEQ ID NO: 140676 - protein, 9 aa, Homo Sapiens
YQEVGAKVL

SEQ ID NO: 140677 - protein, 9 aa, Homo Sapiens
YQIAVTKVL

SEQ ID NO: 140678 - protein, 9 aa, Homo Sapiens
YQIDTVINL

SEQ ID NO: 140679 - protein, 9 aa, Homo Sapiens
YQIPTENSM

SEQ ID NO: 140680 - protein, 9 aa, Homo Sapiens
YQNPQITQL

SEQ ID NO: 140681 - protein, 9 aa, Homo Sapiens
YQQELEREL

SEQ ID NO: 140682 - protein, 9 aa, Homo Sapiens
YSAPCTYEL

SEQ ID NO: 140683 - protein, 9 aa, Homo Sapiens
YSAPVIHVL

SEQ ID NO: 140684 - protein, 9 aa, Homo Sapiens
YSDDIPHAL

SEQ ID NO: 140685 - protein, 9 aa, Homo Sapiens
YSFDYPSDM

SEQ ID NO: 140686 - protein, 9 aa, Homo Sapiens
YSFHKFHYL

SEQ ID NO: 140687 - protein, 9 aa, Homo Sapiens
YSIAQFKYL

SEQ ID NO: 140688 - protein, 9 aa, Homo Sapiens
YSIGPNSKL

SEQ ID NO: 140689 - protein, 9 aa, Homo Sapiens
YSINMNVFL

SEQ ID NO: 140690 - protein, 9 aa, Homo Sapiens
YSIVGLSSL

SEQ ID NO: 140691 - protein, 9 aa, Homo Sapiens
YSIYVYKVL

SEQ ID NO: 140692 - protein, 9 aa, Homo Sapiens
YSKLPGVSL

SEQ ID NO: 140693 - protein, 9 aa, Homo Sapiens
YSLCPGREL

SEQ ID NO: 140694 - protein, 9 aa, Homo Sapiens
YSLDHISSL

SEQ ID NO: 140695 - protein, 9 aa, Homo Sapiens
YSLPNAPTL

SEQ ID NO: 140696 - protein, 9 aa, Homo Sapiens
YSMPSTHAM

SEQ ID NO: 140697 - protein, 9 aa, Homo Sapiens
YSMPVHAAV

SEQ ID NO: 140698 - protein, 9 aa, Homo Sapiens
YSSMFFITL

SEQ ID NO: 140699 - protein, 9 aa, Homo Sapiens
YSSPFDPVL

SEQ ID NO: 140700 - protein, 9 aa, Homo Sapiens
YSTPHAFTF

SEQ ID NO: 140701 - protein, 9 aa, Homo Sapiens
YSVPSSQEL

SEQ ID NO: 140702 - protein, 9 aa, Homo Sapiens
YSVRVSPQM

SEQ ID NO: 140703 - protein, 9 aa, Homo Sapiens
YSVYVYKVL

SEQ ID NO: 140704 - protein, 9 aa, Homo Sapiens
YSWVGRPLL

SEQ ID NO: 140705 - protein, 9 aa, Homo Sapiens
YSYDLSHSL

SEQ ID NO: 140706 - protein, 9 aa, Homo Sapiens
YSYFSPRTM

SEQ ID NO: 140707 - protein, 9 aa, Homo Sapiens
YTIENPRHF

SEQ ID NO: 140708 - protein, 9 aa, Homo Sapiens
YTIPAHQNL

SEQ ID NO: 140709 - protein, 9 aa, Homo Sapiens
YTIPLAIKL

SEQ ID NO: 140710 - protein, 9 aa, Homo Sapiens
YTIPLSPVL

SEQ ID NO: 140711 - protein, 9 aa, Homo Sapiens
YTIPPGHQV

SEQ ID NO: 140712 - protein, 9 aa, Homo Sapiens
YTLINHRVL

SEQ ID NO: 140713 - protein, 9 aa, Homo Sapiens
YTMVYWHAL

SEQ ID NO: 140714 - protein, 9 aa, Homo Sapiens
YTNGKCVIL

SEQ ID NO: 140715 - protein, 9 aa, Homo Sapiens
YTSEVQAIL

SEQ ID NO: 140716 - protein, 9 aa, Homo Sapiens
YTSGTFRTV

SEQ ID NO: 140717 - protein, 9 aa, Homo Sapiens
YTSPVNPAV

SEQ ID NO: 140718 - protein, 9 aa, Homo Sapiens
YTTDFIYQL

SEQ ID NO: 140719 - protein, 9 aa, Homo Sapiens
YTTDRVMTV

SEQ ID NO: 140720 - protein, 9 aa, Homo Sapiens
YTVKAILIL

SEQ ID NO: 140721 - protein, 9 aa, Homo Sapiens
YTVLTRIGL

SEQ ID NO: 140722 - protein, 9 aa, Homo Sapiens
YTVVYFPVR

SEQ ID NO: 140723 - protein, 9 aa, Homo Sapiens
YVADPGGSL

SEQ ID NO: 140724 - protein, 9 aa, Homo Sapiens
YVAQAGLEL

SEQ ID NO: 140725 - protein, 9 aa, Homo Sapiens
YVDPVNKVL

SEQ ID NO: 140726 - protein, 9 aa, Homo Sapiens
YVFPGVTRL

SEQ ID NO: 140727 - protein, 9 aa, Homo Sapiens
YVHPFIFAL

SEQ ID NO: 140728 - protein, 9 aa, Homo Sapiens
YVIAYIRDL

SEQ ID NO: 140729 - protein, 9 aa, Homo Sapiens
YVIDPIKGL

SEQ ID NO: 140730 - protein, 9 aa, Homo Sapiens
YVINVTTHL

SEQ ID NO: 140731 - protein, 9 aa, Homo Sapiens
YVIQKFFEF

SEQ ID NO: 140732 - protein, 9 aa, Homo Sapiens
YVNLPTIAL

SEQ ID NO: 140733 - protein, 9 aa, Homo Sapiens
YVSPRILTA

SEQ ID NO: 140734 - protein, 9 aa, Homo Sapiens
YVTESQPDL

SEQ ID NO: 140735 - protein, 9 aa, Homo Sapiens
YVVPYMIHL

SEQ ID NO: 140736 - protein, 9 aa, Homo Sapiens
YVVPYTIHL

SEQ ID NO: 140737 - protein, 9 aa, Homo Sapiens
YYVDFFKTL

SEQ ID NO: 140738 - protein, 10 aa, Homo Sapiens
AAAPVPTTTL

SEQ ID NO: 140739 - protein, 10 aa, Homo Sapiens
AAFEALGTAL

SEQ ID NO: 140740 - protein, 10 aa, Homo Sapiens
AAFGGHPQCL

SEQ ID NO: 140741 - protein, 10 aa, Homo Sapiens
AAFPGASLYL

SEQ ID NO: 140742 - protein, 10 aa, Homo Sapiens
AAIDPRVQYL

SEQ ID NO: 140743 - protein, 10 aa, Homo Sapiens
AAIDPSMVSA

SEQ ID NO: 140744 - protein, 10 aa, Homo Sapiens
AAIKPGTPLY

SEQ ID NO: 140745 - protein, 10 aa, Homo Sapiens
AAINPELLQL

SEQ ID NO: 140746 - protein, 10 aa, Homo Sapiens
AAWEPSKNTL

SEQ ID NO: 140747 - protein, 10 aa, Homo Sapiens
AAYIGSMRPL

SEQ ID NO: 140748 - protein, 10 aa, Homo Sapiens
ACASEEVPTL

SEQ ID NO: 140749 - protein, 10 aa, Homo Sapiens
AINVNDSVTK

SEQ ID NO: 140750 - protein, 10 aa, Homo Sapiens
ATPEQPVLDL

SEQ ID NO: 140751 - protein, 10 aa, Homo Sapiens
AVISLEGKPL

SEQ ID NO: 140752 - protein, 10 aa, Homo Sapiens
CAYDRIVVAG

SEQ ID NO: 140753 - protein, 10 aa, Homo Sapiens
DINTDGAVNF

SEQ ID NO: 140754 - protein, 10 aa, Homo Sapiens
FAAPTTGNQI

SEQ ID NO: 140755 - protein, 10 aa, Homo Sapiens
FAATADPAAL

SEQ ID NO: 140756 - protein, 10 aa, Homo Sapiens
FADPEVLRRL

SEQ ID NO: 140757 - protein, 10 aa, Homo Sapiens
FADPHGKRVF

SEQ ID NO: 140758 - protein, 10 aa, Homo Sapiens
FADPHSKRVF

SEQ ID NO: 140759 - protein, 10 aa, Homo Sapiens
FADSFDRGTL

SEQ ID NO: 140760 - protein, 10 aa, Homo Sapiens
FADSHELSEL

SEQ ID NO: 140761 - protein, 10 aa, Homo Sapiens
FAEALATHIL

SEQ ID NO: 140762 - protein, 10 aa, Homo Sapiens
FAESGWRSAL

SEQ ID NO: 140763 - protein, 10 aa, Homo Sapiens
FAFESDLHSL

SEQ ID NO: 140764 - protein, 10 aa, Homo Sapiens
FAFSPDGKFL

SEQ ID NO: 140765 - protein, 10 aa, Homo Sapiens
FAFSPDGRHL

SEQ ID NO: 140766 - protein, 10 aa, Homo Sapiens
FAHVGQLTGM

SEQ ID NO: 140767 - protein, 10 aa, Homo Sapiens
FAIDSSHPWL

SEQ ID NO: 140768 - protein, 10 aa, Homo Sapiens
FAINIDNKDL

SEQ ID NO: 140769 - protein, 10 aa, Homo Sapiens
FAIPMIHAVL

SEQ ID NO: 140770 - protein, 10 aa, Homo Sapiens
FAIRGLAEAL

SEQ ID NO: 140771 - protein, 10 aa, Homo Sapiens
FAIRWGFIPL

SEQ ID NO: 140772 - protein, 10 aa, Homo Sapiens
FAITEPLVTF

SEQ ID NO: 140773 - protein, 10 aa, Homo Sapiens
FAIVASDTRL

SEQ ID NO: 140774 - protein, 10 aa, Homo Sapiens
FALEAGALVL

SEQ ID NO: 140775 - protein, 10 aa, Homo Sapiens
FALGGNKQAL

SEQ ID NO: 140776 - protein, 10 aa, Homo Sapiens
FALGLPFLVL

SEQ ID NO: 140777 - protein, 10 aa, Homo Sapiens
FALPYVDHFL

SEQ ID NO: 140778 - protein, 10 aa, Homo Sapiens
FAMTGERVDL

SEQ ID NO: 140779 - protein, 10 aa, Homo Sapiens
FAQDGQHQVL

SEQ ID NO: 140780 - protein, 10 aa, Homo Sapiens
FAQQNSGHFL

SEQ ID NO: 140781 - protein, 10 aa, Homo Sapiens
FASPTSPPVL

SEQ ID NO: 140782 - protein, 10 aa, Homo Sapiens
FASTILHLVV

SEQ ID NO: 140783 - protein, 10 aa, Homo Sapiens
FATFPSSAFL

SEQ ID NO: 140784 - protein, 10 aa, Homo Sapiens
FATLTRPLAL

SEQ ID NO: 140785 - protein, 10 aa, Homo Sapiens
FAVDPQITSL

SEQ ID NO: 140786 - protein, 10 aa, Homo Sapiens
FAVEPQGPAL

SEQ ID NO: 140787 - protein, 10 aa, Homo Sapiens
FAVSSKVTSM

SEQ ID NO: 140788 - protein, 10 aa, Homo Sapiens
FAYGGHPYPF

SEQ ID NO: 140789 - protein, 10 aa, Homo Sapiens
FAYGQNKTAF

SEQ ID NO: 140790 - protein, 10 aa, Homo Sapiens
FAYPNRPDVL

SEQ ID NO: 140791 - protein, 10 aa, Homo Sapiens
FAYSDSRVGF

SEQ ID NO: 140792 - protein, 10 aa, Homo Sapiens
FIMEGGAMVL

SEQ ID NO: 140793 - protein, 10 aa, Homo Sapiens
FINVPPQIAL

SEQ ID NO: 140794 - protein, 10 aa, Homo Sapiens
FIPEHTNLSL

SEQ ID NO: 140795 - protein, 10 aa, Homo Sapiens
FIVPTGKTGL

SEQ ID NO: 140796 - protein, 10 aa, Homo Sapiens
FIYPSNMQTM

SEQ ID NO: 140797 - protein, 10 aa, Homo Sapiens
FLESGGFRSL

SEQ ID NO: 140798 - protein, 10 aa, Homo Sapiens
FLFDKPVSPL

SEQ ID NO: 140799 - protein, 10 aa, Homo Sapiens
FLIENPKTSL

SEQ ID NO: 140800 - protein, 10 aa, Homo Sapiens
FLPEFPSCSL

SEQ ID NO: 140801 - protein, 10 aa, Homo Sapiens
FLPTSLPPEL

SEQ ID NO: 140802 - protein, 10 aa, Homo Sapiens
FLSEHPNVTL

SEQ ID NO: 140803 - protein, 10 aa, Homo Sapiens
FLVNHDFSPL

SEQ ID NO: 140804 - protein, 10 aa, Homo Sapiens
FSAPTPIQAL

SEQ ID NO: 140805 - protein, 10 aa, Homo Sapiens
FSDIQTGRVL

SEQ ID NO: 140806 - protein, 10 aa, Homo Sapiens
FSFGGKLVTF

SEQ ID NO: 140807 - protein, 10 aa, Homo Sapiens
FSINAQRNAL

SEQ ID NO: 140808 - protein, 10 aa, Homo Sapiens
FSLEYPTISL

SEQ ID NO: 140809 - protein, 10 aa, Homo Sapiens
FSVPDVPKSM

SEQ ID NO: 140810 - protein, 10 aa, Homo Sapiens
FSVPPTEETL

SEQ ID NO: 140811 - protein, 10 aa, Homo Sapiens
FSYQGRASSL

SEQ ID NO: 140812 - protein, 10 aa, Homo Sapiens
FTQPSRLLSL

SEQ ID NO: 140813 - protein, 10 aa, Homo Sapiens
FTSSLPKYPL

SEQ ID NO: 140814 - protein, 10 aa, Homo Sapiens
FVAPPGNISL

SEQ ID NO: 140815 - protein, 10 aa, Homo Sapiens
FVAPWNSLSL

SEQ ID NO: 140816 - protein, 10 aa, Homo Sapiens
FVDPNGKISL

SEQ ID NO: 140817 - protein, 10 aa, Homo Sapiens
FVEDTECRTL

SEQ ID NO: 140818 - protein, 10 aa, Homo Sapiens
FVLPATPPQL

SEQ ID NO: 140819 - protein, 10 aa, Homo Sapiens
FVMEGEPPKL

SEQ ID NO: 140820 - protein, 10 aa, Homo Sapiens
FVPPQGSPTM

SEQ ID NO: 140821 - protein, 10 aa, Homo Sapiens
FVSAGIQTSF

SEQ ID NO: 140822 - protein, 10 aa, Homo Sapiens
GAIGGTPPAF

SEQ ID NO: 140823 - protein, 10 aa, Homo Sapiens
GPPGTGKTLI

SEQ ID NO: 140824 - protein, 10 aa, Homo Sapiens
GPPPPPGKPQ

SEQ ID NO: 140825 - protein, 10 aa, Homo Sapiens
HAAEYGAEAL

SEQ ID NO: 140826 - protein, 10 aa, Homo Sapiens
HAIDRVTTSV

SEQ ID NO: 140827 - protein, 10 aa, Homo Sapiens
HALPPSLIPL

SEQ ID NO: 140828 - protein, 10 aa, Homo Sapiens
HIYDNQGIEL

SEQ ID NO: 140829 - protein, 10 aa, Homo Sapiens
IADNHTPKEL

SEQ ID NO: 140830 - protein, 10 aa, Homo Sapiens
IAISRTPVLM

SEQ ID NO: 140831 - protein, 10 aa, Homo Sapiens
IAVDPRHLSL

SEQ ID NO: 140832 - protein, 10 aa, Homo Sapiens
IAVPAVLPSF

SEQ ID NO: 140833 - protein, 10 aa, Homo Sapiens
ISIEGNKMPL

SEQ ID NO: 140834 - protein, 10 aa, Homo Sapiens
ISNGELFQVL

SEQ ID NO: 140835 - protein, 10 aa, Homo Sapiens
KAVDPSSVAL

SEQ ID NO: 140836 - protein, 10 aa, Homo Sapiens
KGIDYDFPSL

SEQ ID NO: 140837 - protein, 10 aa, Homo Sapiens
KITPLEIEVL

SEQ ID NO: 140838 - protein, 10 aa, Homo Sapiens
KLPEYNPRTL

SEQ ID NO: 140839 - protein, 10 aa, Homo Sapiens
LAAAGLGGVA

SEQ ID NO: 140840 - protein, 10 aa, Homo Sapiens
LAAPATRAAL

SEQ ID NO: 140841 - protein, 10 aa, Homo Sapiens
LAAPGHPPVL

SEQ ID NO: 140842 - protein, 10 aa, Homo Sapiens
LAAPNGAEPL

SEQ ID NO: 140843 - protein, 10 aa, Homo Sapiens
LAEEGTAKLI

SEQ ID NO: 140844 - protein, 10 aa, Homo Sapiens
LAFDPSGQRL

SEQ ID NO: 140845 - protein, 10 aa, Homo Sapiens
LAFSNDGTTL

SEQ ID NO: 140846 - protein, 10 aa, Homo Sapiens
LAHIYTELQL

SEQ ID NO: 140847 - protein, 10 aa, Homo Sapiens
LALGAPSPTV

SEQ ID NO: 140848 - protein, 10 aa, Homo Sapiens
LALPGKPPFL

SEQ ID NO: 140849 - protein, 10 aa, Homo Sapiens
LAMGVNLTSM

SEQ ID NO: 140850 - protein, 10 aa, Homo Sapiens
LASNPGMANL

SEQ ID NO: 140851 - protein, 10 aa, Homo Sapiens
LASPLDPQAL

SEQ ID NO: 140852 - protein, 10 aa, Homo Sapiens
LATDFIQSLL

SEQ ID NO: 140853 - protein, 10 aa, Homo Sapiens
LAVDPNGAFL

SEQ ID NO: 140854 - protein, 10 aa, Homo Sapiens
LAVDPNGIYL

SEQ ID NO: 140855 - protein, 10 aa, Homo Sapiens
LAVEHDNISL

SEQ ID NO: 140856 - protein, 10 aa, Homo Sapiens
LAVHPPGVSK

SEQ ID NO: 140857 - protein, 10 aa, Homo Sapiens
LAVHPSGVAL

SEQ ID NO: 140858 - protein, 10 aa, Homo Sapiens
LAYPARPAQL

SEQ ID NO: 140859 - protein, 10 aa, Homo Sapiens
LAYSGKLEEL

SEQ ID NO: 140860 - protein, 10 aa, Homo Sapiens
LDIEIATYRK

SEQ ID NO: 140861 - protein, 10 aa, Homo Sapiens
LGIPYAQPPL

SEQ ID NO: 140862 - protein, 10 aa, Homo Sapiens
LLDPNIYRTM

SEQ ID NO: 140863 - protein, 10 aa, Homo Sapiens
LLESGTLGTK

SEQ ID NO: 140864 - protein, 10 aa, Homo Sapiens
LQPPKPLSSL

SEQ ID NO: 140865 - protein, 10 aa, Homo Sapiens
LSFETTEESL

SEQ ID NO: 140866 - protein, 10 aa, Homo Sapiens
LSSPFPSSSF

SEQ ID NO: 140867 - protein, 10 aa, Homo Sapiens
LVHPNPPSVL

SEQ ID NO: 140868 - protein, 10 aa, Homo Sapiens
LVVPVGGLSF

SEQ ID NO: 140869 - protein, 10 aa, Homo Sapiens
MAALPFTKSL

SEQ ID NO: 140870 - protein, 10 aa, Homo Sapiens
MAIAPNVTVM

SEQ ID NO: 140871 - protein, 10 aa, Homo Sapiens
MAYGASFLSF

SEQ ID NO: 140872 - protein, 10 aa, Homo Sapiens
MAYHGLTVPL

SEQ ID NO: 140873 - protein, 10 aa, Homo Sapiens
MMPPMGGPPM

SEQ ID NO: 140874 - protein, 10 aa, Homo Sapiens
MVPPVQVSPL

SEQ ID NO: 140875 - protein, 10 aa, Homo Sapiens
NAAGVPKQSL

SEQ ID NO: 140876 - protein, 10 aa, Homo Sapiens
NGWGVMVSHR

SEQ ID NO: 140877 - protein, 10 aa, Homo Sapiens
PLELELCPGR

SEQ ID NO: 140878 - protein, 10 aa, Homo Sapiens
QEYEALLNIK

SEQ ID NO: 140879 - protein, 10 aa, Homo Sapiens
RAGGVGLLVL

SEQ ID NO: 140880 - protein, 10 aa, Homo Sapiens
RAMEGELGEL

SEQ ID NO: 140881 - protein, 10 aa, Homo Sapiens
RAVVPSYIPL

SEQ ID NO: 140882 - protein, 10 aa, Homo Sapiens
RLLLPGELAK

SEQ ID NO: 140883 - protein, 10 aa, Homo Sapiens
RVLEKPESLL

SEQ ID NO: 140884 - protein, 10 aa, Homo Sapiens
SAAFPYGGVL

SEQ ID NO: 140885 - protein, 10 aa, Homo Sapiens
SANPANPAIL

SEQ ID NO: 140886 - protein, 10 aa, Homo Sapiens
SAPGPGYAPL

SEQ ID NO: 140887 - protein, 10 aa, Homo Sapiens
SIFETVGSVL

SEQ ID NO: 140888 - protein, 10 aa, Homo Sapiens
SLEVENQSLR

SEQ ID NO: 140889 - protein, 10 aa, Homo Sapiens
STASAVPLAK

SEQ ID NO: 140890 - protein, 10 aa, Homo Sapiens
TLMLPSAVTR

SEQ ID NO: 140891 - protein, 10 aa, Homo Sapiens
TLNPNYCRSK

SEQ ID NO: 140892 - protein, 10 aa, Homo Sapiens
TLSNHQLTHL

SEQ ID NO: 140893 - protein, 10 aa, Homo Sapiens
VAAPPPKNSF

SEQ ID NO: 140894 - protein, 10 aa, Homo Sapiens
VADGIFKAEL

SEQ ID NO: 140895 - protein, 10 aa, Homo Sapiens
VAFLAMLLVL

SEQ ID NO: 140896 - protein, 10 aa, Homo Sapiens
VAMNPTNTVF

SEQ ID NO: 140897 - protein, 10 aa, Homo Sapiens
VAMPGVPAFL

SEQ ID NO: 140898 - protein, 10 aa, Homo Sapiens
VAVPASLLGM

SEQ ID NO: 140899 - protein, 10 aa, Homo Sapiens
VAYPRTGGTL

SEQ ID NO: 140900 - protein, 10 aa, Homo Sapiens
VAYSHDGAFL

SEQ ID NO: 140901 - protein, 10 aa, Homo Sapiens
VEQCEREKEI

SEQ ID NO: 140902 - protein, 10 aa, Homo Sapiens
VFPSIVGRPR

SEQ ID NO: 140903 - protein, 10 aa, Homo Sapiens
VIADPRGNTL

SEQ ID NO: 140904 - protein, 10 aa, Homo Sapiens
VSAAGLVQGL

SEQ ID NO: 140905 - protein, 10 aa, Homo Sapiens
VSIEPNFHSL

SEQ ID NO: 140906 - protein, 10 aa, Homo Sapiens
VVPPFLQPEV

SEQ ID NO: 140907 - protein, 10 aa, Homo Sapiens
WADPTGTRKL

SEQ ID NO: 140908 - protein, 10 aa, Homo Sapiens
WHHTFYNELR

SEQ ID NO: 140909 - protein, 10 aa, Homo Sapiens
YAAKVGVNIL

SEQ ID NO: 140910 - protein, 10 aa, Homo Sapiens
YACRVNHVTL

SEQ ID NO: 140911 - protein, 10 aa, Homo Sapiens
YADPNFVRTF

SEQ ID NO: 140912 - protein, 10 aa, Homo Sapiens
YADPTKRLEL

SEQ ID NO: 140913 - protein, 10 aa, Homo Sapiens
YAFNGTQRFL

SEQ ID NO: 140914 - protein, 10 aa, Homo Sapiens
YAFPKAVSVF

SEQ ID NO: 140915 - protein, 10 aa, Homo Sapiens
YAHPLETLIL

SEQ ID NO: 140916 - protein, 10 aa, Homo Sapiens
YAIENVETNL

SEQ ID NO: 140917 - protein, 10 aa, Homo Sapiens
YAIPTVCVGL

SEQ ID NO: 140918 - protein, 10 aa, Homo Sapiens
YAIVANVESM

SEQ ID NO: 140919 - protein, 10 aa, Homo Sapiens
YALCGFGGVL

SEQ ID NO: 140920 - protein, 10 aa, Homo Sapiens
YALDVRVNSL

SEQ ID NO: 140921 - protein, 10 aa, Homo Sapiens
YALPHAILRL

SEQ ID NO: 140922 - protein, 10 aa, Homo Sapiens
YAMDYSNKAL

SEQ ID NO: 140923 - protein, 10 aa, Homo Sapiens
YAQHSYFGSF

SEQ ID NO: 140924 - protein, 10 aa, Homo Sapiens
YASFIEDNEL

SEQ ID NO: 140925 - protein, 10 aa, Homo Sapiens
YATDVVEAFL

SEQ ID NO: 140926 - protein, 10 aa, Homo Sapiens
YAVDRAITHL

SEQ ID NO: 140927 - protein, 10 aa, Homo Sapiens
YAVEGRDLTL

SEQ ID NO: 140928 - protein, 10 aa, Homo Sapiens
YAVWFGGSML

SEQ ID NO: 140929 - protein, 10 aa, Homo Sapiens
YAYDGKDYIA

SEQ ID NO: 140930 - protein, 10 aa, Homo Sapiens
YCEPPTGVSL

SEQ ID NO: 140931 - protein, 10 aa, Homo Sapiens
YFIAPSGHGL

SEQ ID NO: 140932 - protein, 10 aa, Homo Sapiens
YFIAPTGHSL

SEQ ID NO: 140933 - protein, 10 aa, Homo Sapiens
YFIPATGHSL

SEQ ID NO: 140934 - protein, 10 aa, Homo Sapiens
YFISPTGHSL

SEQ ID NO: 140935 - protein, 10 aa, Homo Sapiens
YFITPTGHSL

SEQ ID NO: 140936 - protein, 10 aa, Homo Sapiens
YGPPGTGKTL

SEQ ID NO: 140937 - protein, 10 aa, Homo Sapiens
YIAEPSMHSM

SEQ ID NO: 140938 - protein, 10 aa, Homo Sapiens
YISPFHDIPI

SEQ ID NO: 140939 - protein, 10 aa, Homo Sapiens
YLDPRITVAW

SEQ ID NO: 140940 - protein, 10 aa, Homo Sapiens
YQDPSFHLSL

SEQ ID NO: 140941 - protein, 10 aa, Homo Sapiens
YSWVGRPLLD

SEQ ID NO: 140942 - protein, 10 aa, Homo Sapiens
YTYESKMAFL

SEQ ID NO: 140943 - protein, 10 aa, Homo Sapiens
YVFDGKPPQL

SEQ ID NO: 140944 - protein, 10 aa, Homo Sapiens
YVIEPHSMEF

SEQ ID NO: 140945 - protein, 10 aa, Homo Sapiens
YVIGPKGNSL

SEQ ID NO: 140946 - protein, 10 aa, Homo Sapiens
YVIPHPVHAF

SEQ ID NO: 140947 - protein, 11 aa, Homo Sapiens
AAAPPSPPFSF

SEQ ID NO: 140948 - protein, 11 aa, Homo Sapiens
AAFLAKDFNFL

SEQ ID NO: 140949 - protein, 11 aa, Homo Sapiens
AAFQPNQYQML

SEQ ID NO: 140950 - protein, 11 aa, Homo Sapiens
AAFTADPLSLL

SEQ ID NO: 140951 - protein, 11 aa, Homo Sapiens
AAIDARIFHEL

SEQ ID NO: 140952 - protein, 11 aa, Homo Sapiens
AALLKYNEAVK

SEQ ID NO: 140953 - protein, 11 aa, Homo Sapiens
AALPAELQREL

SEQ ID NO: 140954 - protein, 11 aa, Homo Sapiens
AALPDASPGNL

SEQ ID NO: 140955 - protein, 11 aa, Homo Sapiens
AAMASLGALAL

SEQ ID NO: 140956 - protein, 11 aa, Homo Sapiens
AATGATPIAGR

SEQ ID NO: 140957 - protein, 11 aa, Homo Sapiens
AAVVVSKSGSL

SEQ ID NO: 140958 - protein, 11 aa, Homo Sapiens
AAYYPSDVSSL

SEQ ID NO: 140959 - protein, 11 aa, Homo Sapiens
AKTREVLVSHL

SEQ ID NO: 140960 - protein, 11 aa, Homo Sapiens
ALNEANLSNLK

SEQ ID NO: 140961 - protein, 11 aa, Homo Sapiens
ATIDPDTISAL

SEQ ID NO: 140962 - protein, 11 aa, Homo Sapiens
AVVGGLDIHKK

SEQ ID NO: 140963 - protein, 11 aa, Homo Sapiens
CEASLPTVPVL

SEQ ID NO: 140964 - protein, 11 aa, Homo Sapiens
CGLTHTAVVPL

SEQ ID NO: 140965 - protein, 11 aa, Homo Sapiens
CSALLDVSQVD

SEQ ID NO: 140966 - protein, 11 aa, Homo Sapiens
CSLSPDVDPVL

SEQ ID NO: 140967 - protein, 11 aa, Homo Sapiens
CTFIRVSGSEL

SEQ ID NO: 140968 - protein, 11 aa, Homo Sapiens
FAFDSEGNYML

SEQ ID NO: 140969 - protein, 11 aa, Homo Sapiens
FAFEGIGDEDL

SEQ ID NO: 140970 - protein, 11 aa, Homo Sapiens
FAFESDLHSLL

SEQ ID NO: 140971 - protein, 11 aa, Homo Sapiens
FAFQESPPRFL

SEQ ID NO: 140972 - protein, 11 aa, Homo Sapiens
FAHFPGLASEL

SEQ ID NO: 140973 - protein, 11 aa, Homo Sapiens
FAKPVYPGQTL

SEQ ID NO: 140974 - protein, 11 aa, Homo Sapiens
FALAVRKGGAL

SEQ ID NO: 140975 - protein, 11 aa, Homo Sapiens
FALESGGGSIL

SEQ ID NO: 140976 - protein, 11 aa, Homo Sapiens
FALLTGPGSEL

SEQ ID NO: 140977 - protein, 11 aa, Homo Sapiens
FAMNVGKARGF

SEQ ID NO: 140978 - protein, 11 aa, Homo Sapiens
FANTPKYSQVL

SEQ ID NO: 140979 - protein, 11 aa, Homo Sapiens
FASDASAVIEH

SEQ ID NO: 140980 - protein, 11 aa, Homo Sapiens
FAVDNVGNRTL

SEQ ID NO: 140981 - protein, 11 aa, Homo Sapiens
FAVESEHDQAM

SEQ ID NO: 140982 - protein, 11 aa, Homo Sapiens
FAVEVGPKSTM

SEQ ID NO: 140983 - protein, 11 aa, Homo Sapiens
FAVPIESDKTL

SEQ ID NO: 140984 - protein, 11 aa, Homo Sapiens
FAVPPALGSNL

SEQ ID NO: 140985 - protein, 11 aa, Homo Sapiens
FAVVARGTTIL

SEQ ID NO: 140986 - protein, 11 aa, Homo Sapiens
FAVVATGETAL

SEQ ID NO: 140987 - protein, 11 aa, Homo Sapiens
FAWCPDGEHIL

SEQ ID NO: 140988 - protein, 11 aa, Homo Sapiens
FAWEPFRGLEL

SEQ ID NO: 140989 - protein, 11 aa, Homo Sapiens
FAYDGKDYLTL

SEQ ID NO: 140990 - protein, 11 aa, Homo Sapiens
FAYDPSNYEYL

SEQ ID NO: 140991 - protein, 11 aa, Homo Sapiens
FAYTGRTAQEL

SEQ ID NO: 140992 - protein, 11 aa, Homo Sapiens
FGISSVPTKGL

SEQ ID NO: 140993 - protein, 11 aa, Homo Sapiens
FILDPNQENVL

SEQ ID NO: 140994 - protein, 11 aa, Homo Sapiens
FLFKVRESGSL

SEQ ID NO: 140995 - protein, 11 aa, Homo Sapiens
FLWDVPSNWTL

SEQ ID NO: 140996 - protein, 11 aa, Homo Sapiens
FQFSSEKQQAL

SEQ ID NO: 140997 - protein, 11 aa, Homo Sapiens
FSDDPNVTKTL

SEQ ID NO: 140998 - protein, 11 aa, Homo Sapiens
FSIDVGYERFL

SEQ ID NO: 140999 - protein, 11 aa, Homo Sapiens
FSLPENIQLSL

SEQ ID NO: 141000 - protein, 11 aa, Homo Sapiens
FTEPGAGLRAL

SEQ ID NO: 141001 - protein, 11 aa, Homo Sapiens
FYLPLDAIKQL

SEQ ID NO: 141002 - protein, 11 aa, Homo Sapiens
GADDRIREFSL

SEQ ID NO: 141003 - protein, 11 aa, Homo Sapiens
GFMCQGGDFTR

SEQ ID NO: 141004 - protein, 11 aa, Homo Sapiens
GGFEITPPVVL

SEQ ID NO: 141005 - protein, 11 aa, Homo Sapiens
GIHETTFNSIM

SEQ ID NO: 141006 - protein, 11 aa, Homo Sapiens
GPPPPPPGKPQ

SEQ ID NO: 141007 - protein, 11 aa, Homo Sapiens
GVVDPRAISVL

SEQ ID NO: 141008 - protein, 11 aa, Homo Sapiens
HAYDGKDYISL

SEQ ID NO: 141009 - protein, 11 aa, Homo Sapiens
HSAPFSTQIPL

SEQ ID NO: 141010 - protein, 11 aa, Homo Sapiens
HTIFASNTSSL

SEQ ID NO: 141011 - protein, 11 aa, Homo Sapiens
IAIKQTPELTL

SEQ ID NO: 141012 - protein, 11 aa, Homo Sapiens
IALDPDTMQAL

SEQ ID NO: 141013 - protein, 11 aa, Homo Sapiens
IAQVPRPGTSL

SEQ ID NO: 141014 - protein, 11 aa, Homo Sapiens
IIHDPGRGAPL

SEQ ID NO: 141015 - protein, 11 aa, Homo Sapiens
IIMEPTECSEL

SEQ ID NO: 141016 - protein, 11 aa, Homo Sapiens
ISPLSASAMIL

SEQ ID NO: 141017 - protein, 11 aa, Homo Sapiens
ITAYLSANITF

SEQ ID NO: 141018 - protein, 11 aa, Homo Sapiens
KSISNPPGSNL

SEQ ID NO: 141019 - protein, 11 aa, Homo Sapiens
LAAEGRLESAL

SEQ ID NO: 141020 - protein, 11 aa, Homo Sapiens
LADCYDAIAVF

SEQ ID NO: 141021 - protein, 11 aa, Homo Sapiens
LADPTERFRSL

SEQ ID NO: 141022 - protein, 11 aa, Homo Sapiens
LALDASQHSSL

SEQ ID NO: 141023 - protein, 11 aa, Homo Sapiens
LATDFIQSLLV

SEQ ID NO: 141024 - protein, 11 aa, Homo Sapiens
LAVDPNRAVPL

SEQ ID NO: 141025 - protein, 11 aa, Homo Sapiens
LAYLGAKPRSL

SEQ ID NO: 141026 - protein, 11 aa, Homo Sapiens
LAYLSTAVGCL

SEQ ID NO: 141027 - protein, 11 aa, Homo Sapiens
LDNISFPKQGS

SEQ ID NO: 141028 - protein, 11 aa, Homo Sapiens
MSIYPSPTGVL

SEQ ID NO: 141029 - protein, 11 aa, Homo Sapiens
MSMEISIHRSL

SEQ ID NO: 141030 - protein, 11 aa, Homo Sapiens
NALKPGFFSHL

SEQ ID NO: 141031 - protein, 11 aa, Homo Sapiens
NDISNLIASEI

SEQ ID NO: 141032 - protein, 11 aa, Homo Sapiens
NLTHLNLSGNK

SEQ ID NO: 141033 - protein, 11 aa, Homo Sapiens
PMFIVNTNVPR

SEQ ID NO: 141034 - protein, 11 aa, Homo Sapiens
RAAPLDSIHSL

SEQ ID NO: 141035 - protein, 11 aa, Homo Sapiens
RAFEVSENGNL

SEQ ID NO: 141036 - protein, 11 aa, Homo Sapiens
SAVCSGLAHAL

SEQ ID NO: 141037 - protein, 11 aa, Homo Sapiens
SIICPGYNAVL

SEQ ID NO: 141038 - protein, 11 aa, Homo Sapiens
SIISPKVKMAL

SEQ ID NO: 141039 - protein, 11 aa, Homo Sapiens
SVTQAECSGVI

SEQ ID NO: 141040 - protein, 11 aa, Homo Sapiens
TAIPVHDGYVL

SEQ ID NO: 141041 - protein, 11 aa, Homo Sapiens
TAISISDHTAL

SEQ ID NO: 141042 - protein, 11 aa, Homo Sapiens
TYAFSGTHYWR

SEQ ID NO: 141043 - protein, 11 aa, Homo Sapiens
VAAPPTAVGSL

SEQ ID NO: 141044 - protein, 11 aa, Homo Sapiens
VAFPSGDASSL

SEQ ID NO: 141045 - protein, 11 aa, Homo Sapiens
VAILIHFLPAK

SEQ ID NO: 141046 - protein, 11 aa, Homo Sapiens
VAMAAGPSGCL

SEQ ID NO: 141047 - protein, 11 aa, Homo Sapiens
VAVDPSILARL

SEQ ID NO: 141048 - protein, 11 aa, Homo Sapiens
VAVHPSTVNPL

SEQ ID NO: 141049 - protein, 11 aa, Homo Sapiens
VAYPHDGKIFF

SEQ ID NO: 141050 - protein, 11 aa, Homo Sapiens
VAYRPISASVL

SEQ ID NO: 141051 - protein, 11 aa, Homo Sapiens
VAYWRQAGLSY

SEQ ID NO: 141052 - protein, 11 aa, Homo Sapiens
WAICPRDSLAL

SEQ ID NO: 141053 - protein, 11 aa, Homo Sapiens
WRPSFSEGTDL

SEQ ID NO: 141054 - protein, 11 aa, Homo Sapiens
YAFGQETNVPL

SEQ ID NO: 141055 - protein, 11 aa, Homo Sapiens
YAFQTEGKLYL

SEQ ID NO: 141056 - protein, 11 aa, Homo Sapiens
YAFRSAEPNAL

SEQ ID NO: 141057 - protein, 11 aa, Homo Sapiens
YAIGVSHPLSI

SEQ ID NO: 141058 - protein, 11 aa, Homo Sapiens
YAISPGLDITF

SEQ ID NO: 141059 - protein, 11 aa, Homo Sapiens
YALCGFGGVLS

SEQ ID NO: 141060 - protein, 11 aa, Homo Sapiens
YAMEQSIKSVL

SEQ ID NO: 141061 - protein, 11 aa, Homo Sapiens
YAVDAYFREAL

SEQ ID NO: 141062 - protein, 11 aa, Homo Sapiens
YAYDGKDYIAL

SEQ ID NO: 141063 - protein, 11 aa, Homo Sapiens
YAYETKDALCL

SEQ ID NO: 141064 - protein, 11 aa, Homo Sapiens
YAYPATAAAPM

SEQ ID NO: 141065 - protein, 11 aa, Homo Sapiens
YGAEALERMFL

SEQ ID NO: 141066 - protein, 11 aa, Homo Sapiens
YGLLPSHASYL

SEQ ID NO: 141067 - protein, 11 aa, Homo Sapiens
YIIGGSVINEL

SEQ ID NO: 141068 - protein, 11 aa, Homo Sapiens
YIMEPSIFNTL

SEQ ID NO: 141069 - protein, 11 aa, Homo Sapiens
YISVPKENSTL

SEQ ID NO: 141070 - protein, 11 aa, Homo Sapiens
YLHDQNPDAAL

SEQ ID NO: 141071 - protein, 11 aa, Homo Sapiens
YSHPVVSSVPL

SEQ ID NO: 141072 - protein, 11 aa, Homo Sapiens
YSLPTSFSGSF

SEQ ID NO: 141073 - protein, 11 aa, Homo Sapiens
YSYPAAVPQAL

SEQ ID NO: 141074 - protein, 11 aa, Homo Sapiens
YTLSPENLQSL

SEQ ID NO: 141075 - protein, 8 aa, Homo Sapiens
AAAPHLLL

SEQ ID NO: 141076 - protein, 8 aa, Homo Sapiens
AAAPPLTL

SEQ ID NO: 141077 - protein, 8 aa, Homo Sapiens
AAAVGLEL

SEQ ID NO: 141078 - protein, 8 aa, Homo Sapiens
AAAWPLLL

SEQ ID NO: 141079 - protein, 8 aa, Homo Sapiens
AAFPGASL

SEQ ID NO: 141080 - protein, 8 aa, Homo Sapiens
AAGPGFSL

SEQ ID NO: 141081 - protein, 8 aa, Homo Sapiens
AAGRPLEL

SEQ ID NO: 141082 - protein, 8 aa, Homo Sapiens
AAIKALEL

SEQ ID NO: 141083 - protein, 8 aa, Homo Sapiens
AASHPLLL

SEQ ID NO: 141084 - protein, 8 aa, Homo Sapiens
AFAEALLL

SEQ ID NO: 141085 - protein, 8 aa, Homo Sapiens
AFVTGYDI

SEQ ID NO: 141086 - protein, 8 aa, Homo Sapiens
AIIPSKKL

SEQ ID NO: 141087 - protein, 8 aa, Homo Sapiens
ASYVSPVL

SEQ ID NO: 141088 - protein, 8 aa, Homo Sapiens
AVGPASIL

SEQ ID NO: 141089 - protein, 8 aa, Homo Sapiens
AYIAHPKL

SEQ ID NO: 141090 - protein, 8 aa, Homo Sapiens
FAAEAIAL

SEQ ID NO: 141091 - protein, 8 aa, Homo Sapiens
FAAEAIAM

SEQ ID NO: 141092 - protein, 8 aa, Homo Sapiens
FAAETLVL

SEQ ID NO: 141093 - protein, 8 aa, Homo Sapiens
FAARPVLL

SEQ ID NO: 141094 - protein, 8 aa, Homo Sapiens
FAFSSQEL

SEQ ID NO: 141095 - protein, 8 aa, Homo Sapiens
FAGFGIGL

SEQ ID NO: 141096 - protein, 8 aa, Homo Sapiens
FAGKVLRL

SEQ ID NO: 141097 - protein, 8 aa, Homo Sapiens
FAGLVQEI

SEQ ID NO: 141098 - protein, 8 aa, Homo Sapiens
FAGMPITL

SEQ ID NO: 141099 - protein, 8 aa, Homo Sapiens
FAGQPLTI

SEQ ID NO: 141100 - protein, 8 aa, Homo Sapiens
FAGWGRAL

SEQ ID NO: 141101 - protein, 8 aa, Homo Sapiens
FAHSFIEL

SEQ ID NO: 141102 - protein, 8 aa, Homo Sapiens
FAHWGQEL

SEQ ID NO: 141103 - protein, 8 aa, Homo Sapiens
FAIDPHLL

SEQ ID NO: 141104 - protein, 8 aa, Homo Sapiens
FALNHPEL

SEQ ID NO: 141105 - protein, 8 aa, Homo Sapiens
FASGAVEL

SEQ ID NO: 141106 - protein, 8 aa, Homo Sapiens
FAVAGQEL

SEQ ID NO: 141107 - protein, 8 aa, Homo Sapiens
FAWGHDEL

SEQ ID NO: 141108 - protein, 8 aa, Homo Sapiens
FAWKPQLL

SEQ ID NO: 141109 - protein, 8 aa, Homo Sapiens
FFLIGPPL

SEQ ID NO: 141110 - protein, 8 aa, Homo Sapiens
FFQVGSDL

SEQ ID NO: 141111 - protein, 8 aa, Homo Sapiens
FFWPGIDL

SEQ ID NO: 141112 - protein, 8 aa, Homo Sapiens
FIGYPITL

SEQ ID NO: 141113 - protein, 8 aa, Homo Sapiens
FITDPVVL

SEQ ID NO: 141114 - protein, 8 aa, Homo Sapiens
FIYNDPTL

SEQ ID NO: 141115 - protein, 8 aa, Homo Sapiens
FIYVNQSF

SEQ ID NO: 141116 - protein, 8 aa, Homo Sapiens
FLAPSLVL

SEQ ID NO: 141117 - protein, 8 aa, Homo Sapiens
FNFVGKIL

SEQ ID NO: 141118 - protein, 8 aa, Homo Sapiens
FNFVGRIL

SEQ ID NO: 141119 - protein, 8 aa, Homo Sapiens
FNHINVEL

SEQ ID NO: 141120 - protein, 8 aa, Homo Sapiens
FQHVGKAF

SEQ ID NO: 141121 - protein, 8 aa, Homo Sapiens
FSAHALKL

SEQ ID NO: 141122 - protein, 8 aa, Homo Sapiens
FSANPKEL

SEQ ID NO: 141123 - protein, 8 aa, Homo Sapiens
FSFDGPEI

SEQ ID NO: 141124 - protein, 8 aa, Homo Sapiens
FSFEGPEI

SEQ ID NO: 141125 - protein, 8 aa, Homo Sapiens
FSFVMPSL

SEQ ID NO: 141126 - protein, 8 aa, Homo Sapiens
FSGPAITL

SEQ ID NO: 141127 - protein, 8 aa, Homo Sapiens
FSGRILGL

SEQ ID NO: 141128 - protein, 8 aa, Homo Sapiens
FSHVAMIL

SEQ ID NO: 141129 - protein, 8 aa, Homo Sapiens
FSHVGWLL

SEQ ID NO: 141130 - protein, 8 aa, Homo Sapiens
FSSNPISL

SEQ ID NO: 141131 - protein, 8 aa, Homo Sapiens
FSVNGKVL

SEQ ID NO: 141132 - protein, 8 aa, Homo Sapiens
FSVTGRVL

SEQ ID NO: 141133 - protein, 8 aa, Homo Sapiens
FSVTGTSL

SEQ ID NO: 141134 - protein, 8 aa, Homo Sapiens
FSYAGFEM

SEQ ID NO: 141135 - protein, 8 aa, Homo Sapiens
FTADPLSL

SEQ ID NO: 141136 - protein, 8 aa, Homo Sapiens
FTFPSHSL

SEQ ID NO: 141137 - protein, 8 aa, Homo Sapiens
FTHASPTL

SEQ ID NO: 141138 - protein, 8 aa, Homo Sapiens
FTIVAESL

SEQ ID NO: 141139 - protein, 8 aa, Homo Sapiens
FTMGGPAI

SEQ ID NO: 141140 - protein, 8 aa, Homo Sapiens
FTMVGKTF

SEQ ID NO: 141141 - protein, 8 aa, Homo Sapiens
FTQQGPRL

SEQ ID NO: 141142 - protein, 8 aa, Homo Sapiens
FTTDAIAL

SEQ ID NO: 141143 - protein, 8 aa, Homo Sapiens
FTYEAVEL

SEQ ID NO: 141144 - protein, 8 aa, Homo Sapiens
FVAPPLVM

SEQ ID NO: 141145 - protein, 8 aa, Homo Sapiens
FVGPSRYL

SEQ ID NO: 141146 - protein, 8 aa, Homo Sapiens
FVGYGVTL

SEQ ID NO: 141147 - protein, 8 aa, Homo Sapiens
FVNVQKEL

SEQ ID NO: 141148 - protein, 8 aa, Homo Sapiens
FVVTGPAL

SEQ ID NO: 141149 - protein, 8 aa, Homo Sapiens
HAAEALLL

SEQ ID NO: 141150 - protein, 8 aa, Homo Sapiens
HSHVALAL

SEQ ID NO: 141151 - protein, 8 aa, Homo Sapiens
HTGPITCL

SEQ ID NO: 141152 - protein, 8 aa, Homo Sapiens
IAAIAQEL

SEQ ID NO: 141153 - protein, 8 aa, Homo Sapiens
IADLAHLL

SEQ ID NO: 141154 - protein, 8 aa, Homo Sapiens
IAGPVVEI

SEQ ID NO: 141155 - protein, 8 aa, Homo Sapiens
IAVNPSIL

SEQ ID NO: 141156 - protein, 8 aa, Homo Sapiens
IIAPSLGF

SEQ ID NO: 141157 - protein, 8 aa, Homo Sapiens
ILGPTFTL

SEQ ID NO: 141158 - protein, 8 aa, Homo Sapiens
ISFSGMSL

SEQ ID NO: 141159 - protein, 8 aa, Homo Sapiens
ISILGKSL

SEQ ID NO: 141160 - protein, 8 aa, Homo Sapiens
ISLEGKPL

SEQ ID NO: 141161 - protein, 8 aa, Homo Sapiens
ISYPGAML

SEQ ID NO: 141162 - protein, 8 aa, Homo Sapiens
ITAPSYVL

SEQ ID NO: 141163 - protein, 8 aa, Homo Sapiens
ITFVNKHL

SEQ ID NO: 141164 - protein, 8 aa, Homo Sapiens
IVFSGSSL

SEQ ID NO: 141165 - protein, 8 aa, Homo Sapiens
IVVEGHEL

SEQ ID NO: 141166 - protein, 8 aa, Homo Sapiens
LAAIAMQL

SEQ ID NO: 141167 - protein, 8 aa, Homo Sapiens
LAAIATEL

SEQ ID NO: 141168 - protein, 8 aa, Homo Sapiens
LADQPHLL

SEQ ID NO: 141169 - protein, 8 aa, Homo Sapiens
LAEVGRVL

SEQ ID NO: 141170 - protein, 8 aa, Homo Sapiens
LAFPGETL

SEQ ID NO: 141171 - protein, 8 aa, Homo Sapiens
LAFVSPSL

SEQ ID NO: 141172 - protein, 8 aa, Homo Sapiens
LAGPALEL

SEQ ID NO: 141173 - protein, 8 aa, Homo Sapiens
LAGPPLEI

SEQ ID NO: 141174 - protein, 8 aa, Homo Sapiens
LAGPVLGL

SEQ ID NO: 141175 - protein, 8 aa, Homo Sapiens
LAHVGPRL

SEQ ID NO: 141176 - protein, 8 aa, Homo Sapiens
LANVSTVL

SEQ ID NO: 141177 - protein, 8 aa, Homo Sapiens
LAWTSSAL

SEQ ID NO: 141178 - protein, 8 aa, Homo Sapiens
LFFVGNQL

SEQ ID NO: 141179 - protein, 8 aa, Homo Sapiens
LGGPPLLL

SEQ ID NO: 141180 - protein, 8 aa, Homo Sapiens
LGIVGPVL

SEQ ID NO: 141181 - protein, 8 aa, Homo Sapiens
LIGPPLLI

SEQ ID NO: 141182 - protein, 8 aa, Homo Sapiens
LIYQGRVL

SEQ ID NO: 141183 - protein, 8 aa, Homo Sapiens
LLGPTVML

SEQ ID NO: 141184 - protein, 8 aa, Homo Sapiens
LLWPGAAL

SEQ ID NO: 141185 - protein, 8 aa, Homo Sapiens
LPSHPLEL

SEQ ID NO: 141186 - protein, 8 aa, Homo Sapiens
LQGPILRL

SEQ ID NO: 141187 - protein, 8 aa, Homo Sapiens
LQKIGPIL

SEQ ID NO: 141188 - protein, 8 aa, Homo Sapiens
LQYSAILT

SEQ ID NO: 141189 - protein, 8 aa, Homo Sapiens
LSFTSQEL

SEQ ID NO: 141190 - protein, 8 aa, Homo Sapiens
LSWPGLAV

SEQ ID NO: 141191 - protein, 8 aa, Homo Sapiens
LTALGPEL

SEQ ID NO: 141192 - protein, 8 aa, Homo Sapiens
LTFVDPVL

SEQ ID NO: 141193 - protein, 8 aa, Homo Sapiens
LTGPVLEL

SEQ ID NO: 141194 - protein, 8 aa, Homo Sapiens
LVGPGVEL

SEQ ID NO: 141195 - protein, 8 aa, Homo Sapiens
MALLGHSL

SEQ ID NO: 141196 - protein, 8 aa, Homo Sapiens
MALLGQAL

SEQ ID NO: 141197 - protein, 8 aa, Homo Sapiens
MAYNAPSL

SEQ ID NO: 141198 - protein, 8 aa, Homo Sapiens
MGHLGVVL

SEQ ID NO: 141199 - protein, 8 aa, Homo Sapiens
MIHLGHIL

SEQ ID NO: 141200 - protein, 8 aa, Homo Sapiens
MTYVGAVF

SEQ ID NO: 141201 - protein, 8 aa, Homo Sapiens
MVGPILEM

SEQ ID NO: 141202 - protein, 8 aa, Homo Sapiens
NAGPAIVI

SEQ ID NO: 141203 - protein, 8 aa, Homo Sapiens
NAYTGIVL

SEQ ID NO: 141204 - protein, 8 aa, Homo Sapiens
QAAPPIEL

SEQ ID NO: 141205 - protein, 8 aa, Homo Sapiens
QMAFQILL

SEQ ID NO: 141206 - protein, 8 aa, Homo Sapiens
QTPPISSL

SEQ ID NO: 141207 - protein, 8 aa, Homo Sapiens
RAHIGPVL

SEQ ID NO: 141208 - protein, 8 aa, Homo Sapiens
SAAPAIQL

SEQ ID NO: 141209 - protein, 8 aa, Homo Sapiens
SAAPAIYL

SEQ ID NO: 141210 - protein, 8 aa, Homo Sapiens
SANIGPFL

SEQ ID NO: 141211 - protein, 8 aa, Homo Sapiens
TAAHGLEL

SEQ ID NO: 141212 - protein, 8 aa, Homo Sapiens
TAAPDLKL

SEQ ID NO: 141213 - protein, 8 aa, Homo Sapiens
TAFIGPAL

SEQ ID NO: 141214 - protein, 8 aa, Homo Sapiens
TAGRVLEL

SEQ ID NO: 141215 - protein, 8 aa, Homo Sapiens
TAIVGMAL

SEQ ID NO: 141216 - protein, 8 aa, Homo Sapiens
TASEPLTL

SEQ ID NO: 141217 - protein, 8 aa, Homo Sapiens
TGWTGIAL

SEQ ID NO: 141218 - protein, 8 aa, Homo Sapiens
TIAPTLIA

SEQ ID NO: 141219 - protein, 8 aa, Homo Sapiens
TSYVGLVL

SEQ ID NO: 141220 - protein, 8 aa, Homo Sapiens
VADLAHVL

SEQ ID NO: 141221 - protein, 8 aa, Homo Sapiens
VATTALEL

SEQ ID NO: 141222 - protein, 8 aa, Homo Sapiens
VAVTPFSL

SEQ ID NO: 141223 - protein, 8 aa, Homo Sapiens
VAYEAPSL

SEQ ID NO: 141224 - protein, 8 aa, Homo Sapiens
VIGPPVVL

SEQ ID NO: 141225 - protein, 8 aa, Homo Sapiens
VIIKPSEL

SEQ ID NO: 141226 - protein, 8 aa, Homo Sapiens
VSGPAMTL

SEQ ID NO: 141227 - protein, 8 aa, Homo Sapiens
VSIVGMAL

SEQ ID NO: 141228 - protein, 8 aa, Homo Sapiens
VSMSPRVY

SEQ ID NO: 141229 - protein, 8 aa, Homo Sapiens
VSQVGKEL

SEQ ID NO: 141230 - protein, 8 aa, Homo Sapiens
VVFVGNFL

SEQ ID NO: 141231 - protein, 8 aa, Homo Sapiens
VVGPNITL

SEQ ID NO: 141232 - protein, 8 aa, Homo Sapiens
VVGPSSVL

SEQ ID NO: 141233 - protein, 8 aa, Homo Sapiens
YAEGVRVL

SEQ ID NO: 141234 - protein, 8 aa, Homo Sapiens
YAFEGSYL

SEQ ID NO: 141235 - protein, 8 aa, Homo Sapiens
YAFLHRTL

SEQ ID NO: 141236 - protein, 8 aa, Homo Sapiens
YAFSARPL

SEQ ID NO: 141237 - protein, 8 aa, Homo Sapiens
YAGPGLSL

SEQ ID NO: 141238 - protein, 8 aa, Homo Sapiens
YAIEAIKL

SEQ ID NO: 141239 - protein, 8 aa, Homo Sapiens
YASRFIVI

SEQ ID NO: 141240 - protein, 8 aa, Homo Sapiens
YATYPREL

SEQ ID NO: 141241 - protein, 8 aa, Homo Sapiens
YFFVDPDL

SEQ ID NO: 141242 - protein, 8 aa, Homo Sapiens
YFNEGTVL

SEQ ID NO: 141243 - protein, 8 aa, Homo Sapiens
YGFVNHAL

SEQ ID NO: 141244 - protein, 8 aa, Homo Sapiens
YIFPGVAL

SEQ ID NO: 141245 - protein, 8 aa, Homo Sapiens
YIHVGAQL

SEQ ID NO: 141246 - protein, 8 aa, Homo Sapiens
YILTSKEL

SEQ ID NO: 141247 - protein, 8 aa, Homo Sapiens
YINLGNVL

SEQ ID NO: 141248 - protein, 8 aa, Homo Sapiens
YLGKVLEL

SEQ ID NO: 141249 - protein, 8 aa, Homo Sapiens
YLNLGPAL

SEQ ID NO: 141250 - protein, 8 aa, Homo Sapiens
YLYVGPSL

SEQ ID NO: 141251 - protein, 8 aa, Homo Sapiens
YSFDGPSL

SEQ ID NO: 141252 - protein, 8 aa, Homo Sapiens
YSIVGQKL

SEQ ID NO: 141253 - protein, 8 aa, Homo Sapiens
YSLDMWRL

SEQ ID NO: 141254 - protein, 8 aa, Homo Sapiens
YSLPGVAL

SEQ ID NO: 141255 - protein, 8 aa, Homo Sapiens
YSWLGETL

SEQ ID NO: 141256 - protein, 8 aa, Homo Sapiens
YTAEPVTL

SEQ ID NO: 141257 - protein, 8 aa, Homo Sapiens
YTNLGPRL

SEQ ID NO: 141258 - protein, 8 aa, Homo Sapiens
YTYIGEVL

SEQ ID NO: 141259 - protein, 8 aa, Homo Sapiens
YTYIGPVL

SEQ ID NO: 141260 - protein, 8 aa, Homo Sapiens
YVGPAKVI

SEQ ID NO: 141261 - protein, 8 aa, Homo Sapiens
YVGPSLRM

SEQ ID NO: 141262 - protein, 8 aa, Homo Sapiens
YVSFPLEL

SEQ ID NO: 141263 - protein, 8 aa, Homo Sapiens
YWQNHPEL

SEQ ID NO: 141264 - protein, 8 aa, Homo Sapiens
YYINSPEL

SEQ ID NO: 141265 - protein, 9 aa, Homo Sapiens
AAAAATMAL

SEQ ID NO: 141266 - protein, 9 aa, Homo Sapiens
AAAALHPAL

SEQ ID NO: 141267 - protein, 9 aa, Homo Sapiens
AAAAPPLTL

SEQ ID NO: 141268 - protein, 9 aa, Homo Sapiens
AAAAPSPVL

SEQ ID NO: 141269 - protein, 9 aa, Homo Sapiens
AAADVLEAL

SEQ ID NO: 141270 - protein, 9 aa, Homo Sapiens
AAAGSPLSL

SEQ ID NO: 141271 - protein, 9 aa, Homo Sapiens
AAAHFYFEL

SEQ ID NO: 141272 - protein, 9 aa, Homo Sapiens
AAAIKALEL

SEQ ID NO: 141273 - protein, 9 aa, Homo Sapiens
AAANPTLAF

SEQ ID NO: 141274 - protein, 9 aa, Homo Sapiens
AAAPEYKTL

SEQ ID NO: 141275 - protein, 9 aa, Homo Sapiens
AAAPHLLLL

SEQ ID NO: 141276 - protein, 9 aa, Homo Sapiens
AAAPPSPAW

SEQ ID NO: 141277 - protein, 9 aa, Homo Sapiens
AAAPQSLEF

SEQ ID NO: 141278 - protein, 9 aa, Homo Sapiens
AAAPSLLIL

SEQ ID NO: 141279 - protein, 9 aa, Homo Sapiens
AAASAFTSL

SEQ ID NO: 141280 - protein, 9 aa, Homo Sapiens
AAASHFFNL

SEQ ID NO: 141281 - protein, 9 aa, Homo Sapiens
AAASPLLLL

SEQ ID NO: 141282 - protein, 9 aa, Homo Sapiens
AAATSALLL

SEQ ID NO: 141283 - protein, 9 aa, Homo Sapiens
AAAVPRAAF

SEQ ID NO: 141284 - protein, 9 aa, Homo Sapiens
AADAALRVL

SEQ ID NO: 141285 - protein, 9 aa, Homo Sapiens
AADPQIRQF

SEQ ID NO: 141286 - protein, 9 aa, Homo Sapiens
AADPVSPLL

SEQ ID NO: 141287 - protein, 9 aa, Homo Sapiens
AADWHNLIL

SEQ ID NO: 141288 - protein, 9 aa, Homo Sapiens
AAEDAIRNL

SEQ ID NO: 141289 - protein, 9 aa, Homo Sapiens
AAEEGLREL

SEQ ID NO: 141290 - protein, 9 aa, Homo Sapiens
AAFGKSPEI

SEQ ID NO: 141291 - protein, 9 aa, Homo Sapiens
AAFPYGGVL

SEQ ID NO: 141292 - protein, 9 aa, Homo Sapiens
AAFWGQMQM

SEQ ID NO: 141293 - protein, 9 aa, Homo Sapiens
AAGPRPMAL

SEQ ID NO: 141294 - protein, 9 aa, Homo Sapiens
AAGSHVIIL

SEQ ID NO: 141295 - protein, 9 aa, Homo Sapiens
AAHMPAAAL

SEQ ID NO: 141296 - protein, 9 aa, Homo Sapiens
AAIAAVNAL

SEQ ID NO: 141297 - protein, 9 aa, Homo Sapiens
AAIAFLHAL

SEQ ID NO: 141298 - protein, 9 aa, Homo Sapiens
AAIAPPTSL

SEQ ID NO: 141299 - protein, 9 aa, Homo Sapiens
AAIASLLYL

SEQ ID NO: 141300 - protein, 9 aa, Homo Sapiens
AAIDHQIEV

SEQ ID NO: 141301 - protein, 9 aa, Homo Sapiens
AAIEGNLQL

SEQ ID NO: 141302 - protein, 9 aa, Homo Sapiens
AAIETYNLL

SEQ ID NO: 141303 - protein, 9 aa, Homo Sapiens
AAIFHYLII

SEQ ID NO: 141304 - protein, 9 aa, Homo Sapiens
AAIHPSLEI

SEQ ID NO: 141305 - protein, 9 aa, Homo Sapiens
AAIKAFIAV

SEQ ID NO: 141306 - protein, 9 aa, Homo Sapiens
AAIKPGTPL

SEQ ID NO: 141307 - protein, 9 aa, Homo Sapiens
AAINPNHPL

SEQ ID NO: 141308 - protein, 9 aa, Homo Sapiens
AAINRQINL

SEQ ID NO: 141309 - protein, 9 aa, Homo Sapiens
AAIPYWLLL

SEQ ID NO: 141310 - protein, 9 aa, Homo Sapiens
AAISHFLNC

SEQ ID NO: 141311 - protein, 9 aa, Homo Sapiens
AAISHGRVF

SEQ ID NO: 141312 - protein, 9 aa, Homo Sapiens
AAIVAKQVL

SEQ ID NO: 141313 - protein, 9 aa, Homo Sapiens
AAIVPGSQL

SEQ ID NO: 141314 - protein, 9 aa, Homo Sapiens
AAIWFRTYL

SEQ ID NO: 141315 - protein, 9 aa, Homo Sapiens
AAIWQYESL

SEQ ID NO: 141316 - protein, 9 aa, Homo Sapiens
AALDIYETL

SEQ ID NO: 141317 - protein, 9 aa, Homo Sapiens
AALDKATVL

SEQ ID NO: 141318 - protein, 9 aa, Homo Sapiens
AALFKAWAL

SEQ ID NO: 141319 - protein, 9 aa, Homo Sapiens
AALGRALAM

SEQ ID NO: 141320 - protein, 9 aa, Homo Sapiens
AALPFTKSL

SEQ ID NO: 141321 - protein, 9 aa, Homo Sapiens
AALPKATIL

SEQ ID NO: 141322 - protein, 9 aa, Homo Sapiens
AALPLALVL

SEQ ID NO: 141323 - protein, 9 aa, Homo Sapiens
AALPVYQEL

SEQ ID NO: 141324 - protein, 9 aa, Homo Sapiens
AALVPRQAL

SEQ ID NO: 141325 - protein, 9 aa, Homo Sapiens
AALWRFAEL

SEQ ID NO: 141326 - protein, 9 aa, Homo Sapiens
AALYHGMAL

SEQ ID NO: 141327 - protein, 9 aa, Homo Sapiens
AAMEFLQEL

SEQ ID NO: 141328 - protein, 9 aa, Homo Sapiens
AAMKALQAL

SEQ ID NO: 141329 - protein, 9 aa, Homo Sapiens
AAMKLMTAL

SEQ ID NO: 141330 - protein, 9 aa, Homo Sapiens
AAMKNVTEL

SEQ ID NO: 141331 - protein, 9 aa, Homo Sapiens
AAMMAVRVL

SEQ ID NO: 141332 - protein, 9 aa, Homo Sapiens
AAMPRIYEL

SEQ ID NO: 141333 - protein, 9 aa, Homo Sapiens
AAMPVAQHL

SEQ ID NO: 141334 - protein, 9 aa, Homo Sapiens
AAMSHLLEM

SEQ ID NO: 141335 - protein, 9 aa, Homo Sapiens
AAMYKSLEL

SEQ ID NO: 141336 - protein, 9 aa, Homo Sapiens
AANKTIIYL

SEQ ID NO: 141337 - protein, 9 aa, Homo Sapiens
AANKVVLQL

SEQ ID NO: 141338 - protein, 9 aa, Homo Sapiens
AANPFFKLL

SEQ ID NO: 141339 - protein, 9 aa, Homo Sapiens
AANPHSFVF

SEQ ID NO: 141340 - protein, 9 aa, Homo Sapiens
AANPIQFTL

SEQ ID NO: 141341 - protein, 9 aa, Homo Sapiens
AANRLTLEL

SEQ ID NO: 141342 - protein, 9 aa, Homo Sapiens
AAQDRVLSL

SEQ ID NO: 141343 - protein, 9 aa, Homo Sapiens
AAQIPTAAL

SEQ ID NO: 141344 - protein, 9 aa, Homo Sapiens
AASFHSLSL

SEQ ID NO: 141345 - protein, 9 aa, Homo Sapiens
AASMRALVL

SEQ ID NO: 141346 - protein, 9 aa, Homo Sapiens
AASPAGLDL

SEQ ID NO: 141347 - protein, 9 aa, Homo Sapiens
AASPQAPTL

SEQ ID NO: 141348 - protein, 9 aa, Homo Sapiens
AATAATLAL

SEQ ID NO: 141349 - protein, 9 aa, Homo Sapiens
AATDIFSYL

SEQ ID NO: 141350 - protein, 9 aa, Homo Sapiens
AATLLHLEL

SEQ ID NO: 141351 - protein, 9 aa, Homo Sapiens
AATSRIAEL

SEQ ID NO: 141352 - protein, 9 aa, Homo Sapiens
AATTVLQEL

SEQ ID NO: 141353 - protein, 9 aa, Homo Sapiens
AAVALAHAL

SEQ ID NO: 141354 - protein, 9 aa, Homo Sapiens
AAVDTNLTL

SEQ ID NO: 141355 - protein, 9 aa, Homo Sapiens
AAVGEPAFL

SEQ ID NO: 141356 - protein, 9 aa, Homo Sapiens
AAVGSVATL

SEQ ID NO: 141357 - protein, 9 aa, Homo Sapiens
AAVHIILVI

SEQ ID NO: 141358 - protein, 9 aa, Homo Sapiens
AAVKVIQSL

SEQ ID NO: 141359 - protein, 9 aa, Homo Sapiens
AAVNHISQL

SEQ ID NO: 141360 - protein, 9 aa, Homo Sapiens
AAVNSALAF

SEQ ID NO: 141361 - protein, 9 aa, Homo Sapiens
AAVNVICEL

SEQ ID NO: 141362 - protein, 9 aa, Homo Sapiens
AAVPDSVAL

SEQ ID NO: 141363 - protein, 9 aa, Homo Sapiens
AAVPKSLQL

SEQ ID NO: 141364 - protein, 9 aa, Homo Sapiens
AAVPKTFQL

SEQ ID NO: 141365 - protein, 9 aa, Homo Sapiens
AAVPPGSLL

SEQ ID NO: 141366 - protein, 9 aa, Homo Sapiens
AAVPRAAFL

SEQ ID NO: 141367 - protein, 9 aa, Homo Sapiens
AAVRHVLAL

SEQ ID NO: 141368 - protein, 9 aa, Homo Sapiens
AAVRIGSVL

SEQ ID NO: 141369 - protein, 9 aa, Homo Sapiens
AAVSRIVAL

SEQ ID NO: 141370 - protein, 9 aa, Homo Sapiens
AAYAGGLVL

SEQ ID NO: 141371 - protein, 9 aa, Homo Sapiens
AAYDRYLKL

SEQ ID NO: 141372 - protein, 9 aa, Homo Sapiens
AAYHLIIEL

SEQ ID NO: 141373 - protein, 9 aa, Homo Sapiens
AAYLRALSL

SEQ ID NO: 141374 - protein, 9 aa, Homo Sapiens
AAYQSVRIL

SEQ ID NO: 141375 - protein, 9 aa, Homo Sapiens
AAYYHPSYL

SEQ ID NO: 141376 - protein, 9 aa, Homo Sapiens
AFGEGLAQR

SEQ ID NO: 141377 - protein, 9 aa, Homo Sapiens
AGSAVFWVL

SEQ ID NO: 141378 - protein, 9 aa, Homo Sapiens
AGVPLFLLE

SEQ ID NO: 141379 - protein, 9 aa, Homo Sapiens
AIAAVFHTL

SEQ ID NO: 141380 - protein, 9 aa, Homo Sapiens
AIIESGKTL

SEQ ID NO: 141381 - protein, 9 aa, Homo Sapiens
AIIPYFITL

SEQ ID NO: 141382 - protein, 9 aa, Homo Sapiens
AIMDLLLRL

SEQ ID NO: 141383 - protein, 9 aa, Homo Sapiens
AIVGQAQEI

SEQ ID NO: 141384 - protein, 9 aa, Homo Sapiens
AIVKVFLAL

SEQ ID NO: 141385 - protein, 9 aa, Homo Sapiens
ALSHILTAL

SEQ ID NO: 141386 - protein, 9 aa, Homo Sapiens
ALVLLRPVI

SEQ ID NO: 141387 - protein, 9 aa, Homo Sapiens
AQAEVYKEL

SEQ ID NO: 141388 - protein, 9 aa, Homo Sapiens
AQVPFEQIL

SEQ ID NO: 141389 - protein, 9 aa, Homo Sapiens
ASAAAALVL

SEQ ID NO: 141390 - protein, 9 aa, Homo Sapiens
ASAPDPPVL

SEQ ID NO: 141391 - protein, 9 aa, Homo Sapiens
ASFIITKAI

SEQ ID NO: 141392 - protein, 9 aa, Homo Sapiens
ASGPPVSEL

SEQ ID NO: 141393 - protein, 9 aa, Homo Sapiens
ASIPYFHAM

SEQ ID NO: 141394 - protein, 9 aa, Homo Sapiens
ASITPGTIL

SEQ ID NO: 141395 - protein, 9 aa, Homo Sapiens
ASIYTGITL

SEQ ID NO: 141396 - protein, 9 aa, Homo Sapiens
ASLHVMMTL

SEQ ID NO: 141397 - protein, 9 aa, Homo Sapiens
ASLPSGLPI

SEQ ID NO: 141398 - protein, 9 aa, Homo Sapiens
ASSPEHPEL

SEQ ID NO: 141399 - protein, 9 aa, Homo Sapiens
ASSPGILVL

SEQ ID NO: 141400 - protein, 9 aa, Homo Sapiens
ASSPPVLSL

SEQ ID NO: 141401 - protein, 9 aa, Homo Sapiens
ASSPYFAAL

SEQ ID NO: 141402 - protein, 9 aa, Homo Sapiens
ASTARHLYL

SEQ ID NO: 141403 - protein, 9 aa, Homo Sapiens
ASVDKVLEL

SEQ ID NO: 141404 - protein, 9 aa, Homo Sapiens
ASVGKTSIL

SEQ ID NO: 141405 - protein, 9 aa, Homo Sapiens
ASYLRLWAL

SEQ ID NO: 141406 - protein, 9 aa, Homo Sapiens
ATIPPISSL

SEQ ID NO: 141407 - protein, 9 aa, Homo Sapiens
ATTHLSPEL

SEQ ID NO: 141408 - protein, 9 aa, Homo Sapiens
ATVHPGLEL

SEQ ID NO: 141409 - protein, 9 aa, Homo Sapiens
AVAPVASAL

SEQ ID NO: 141410 - protein, 9 aa, Homo Sapiens
AVCVAPSIL

SEQ ID NO: 141411 - protein, 9 aa, Homo Sapiens
AVFGHPFSL

SEQ ID NO: 141412 - protein, 9 aa, Homo Sapiens
AVLPFSPAL

SEQ ID NO: 141413 - protein, 9 aa, Homo Sapiens
AVMNYLPTL

SEQ ID NO: 141414 - protein, 9 aa, Homo Sapiens
AVNPKFVAL

SEQ ID NO: 141415 - protein, 9 aa, Homo Sapiens
AVVGDPIAL

SEQ ID NO: 141416 - protein, 9 aa, Homo Sapiens
AVVLPHQPL

SEQ ID NO: 141417 - protein, 9 aa, Homo Sapiens
CADPQWHVL

SEQ ID NO: 141418 - protein, 9 aa, Homo Sapiens
CAEAVSRVL

SEQ ID NO: 141419 - protein, 9 aa, Homo Sapiens
CAIAQAESL

SEQ ID NO: 141420 - protein, 9 aa, Homo Sapiens
CAIPQVMAI

SEQ ID NO: 141421 - protein, 9 aa, Homo Sapiens
CGVDHMVTL

SEQ ID NO: 141422 - protein, 9 aa, Homo Sapiens
CSLWPGQAL

SEQ ID NO: 141423 - protein, 9 aa, Homo Sapiens
CSSPHALVL

SEQ ID NO: 141424 - protein, 9 aa, Homo Sapiens
CSTVPSLAL

SEQ ID NO: 141425 - protein, 9 aa, Homo Sapiens
CTYGKPVTF

SEQ ID NO: 141426 - protein, 9 aa, Homo Sapiens
EATDIALLL

SEQ ID NO: 141427 - protein, 9 aa, Homo Sapiens
EAYTGGLEL

SEQ ID NO: 141428 - protein, 9 aa, Homo Sapiens
FAAASREVL

SEQ ID NO: 141429 - protein, 9 aa, Homo Sapiens
FAADAMARL

SEQ ID NO: 141430 - protein, 9 aa, Homo Sapiens
FAADIISVL

SEQ ID NO: 141431 - protein, 9 aa, Homo Sapiens
FAADLAEEL

SEQ ID NO: 141432 - protein, 9 aa, Homo Sapiens
FAADVRLMF

SEQ ID NO: 141433 - protein, 9 aa, Homo Sapiens
FAAGIIAHL

SEQ ID NO: 141434 - protein, 9 aa, Homo Sapiens
FAAGLGRSL

SEQ ID NO: 141435 - protein, 9 aa, Homo Sapiens
FAAIGSAVF

SEQ ID NO: 141436 - protein, 9 aa, Homo Sapiens
FAAISGMIL

SEQ ID NO: 141437 - protein, 9 aa, Homo Sapiens
FAALHGPAL

SEQ ID NO: 141438 - protein, 9 aa, Homo Sapiens
FAANVYEAF

SEQ ID NO: 141439 - protein, 9 aa, Homo Sapiens
FAAQRGLAV

SEQ ID NO: 141440 - protein, 9 aa, Homo Sapiens
FAATHSLEF

SEQ ID NO: 141441 - protein, 9 aa, Homo Sapiens
FAAVEGIFF

SEQ ID NO: 141442 - protein, 9 aa, Homo Sapiens
FADALCIGI

SEQ ID NO: 141443 - protein, 9 aa, Homo Sapiens
FADELSHLL

SEQ ID NO: 141444 - protein, 9 aa, Homo Sapiens
FADEVRLSF

SEQ ID NO: 141445 - protein, 9 aa, Homo Sapiens
FADFERHFL

SEQ ID NO: 141446 - protein, 9 aa, Homo Sapiens
FADGFVKAL

SEQ ID NO: 141447 - protein, 9 aa, Homo Sapiens
FADGHVLEL

SEQ ID NO: 141448 - protein, 9 aa, Homo Sapiens
FADGVILLL

SEQ ID NO: 141449 - protein, 9 aa, Homo Sapiens
FADGVYLVL

SEQ ID NO: 141450 - protein, 9 aa, Homo Sapiens
FADHVSSSL

SEQ ID NO: 141451 - protein, 9 aa, Homo Sapiens
FADHVVPLL

SEQ ID NO: 141452 - protein, 9 aa, Homo Sapiens
FADKHIQVL

SEQ ID NO: 141453 - protein, 9 aa, Homo Sapiens
FADLGYKQM

SEQ ID NO: 141454 - protein, 9 aa, Homo Sapiens
FADPHGKVF

SEQ ID NO: 141455 - protein, 9 aa, Homo Sapiens
FADQEVRSL

SEQ ID NO: 141456 - protein, 9 aa, Homo Sapiens
FADRSLLEM

SEQ ID NO: 141457 - protein, 9 aa, Homo Sapiens
FADSTVRVW

SEQ ID NO: 141458 - protein, 9 aa, Homo Sapiens
FADVAPLQL

SEQ ID NO: 141459 - protein, 9 aa, Homo Sapiens
FADVLVHRL

SEQ ID NO: 141460 - protein, 9 aa, Homo Sapiens
FADVNGWHL

SEQ ID NO: 141461 - protein, 9 aa, Homo Sapiens
FAEASGLEL

SEQ ID NO: 141462 - protein, 9 aa, Homo Sapiens
FAEDPPTSL

SEQ ID NO: 141463 - protein, 9 aa, Homo Sapiens
FAEDSLRVI

SEQ ID NO: 141464 - protein, 9 aa, Homo Sapiens
FAEEPGLVL

SEQ ID NO: 141465 - protein, 9 aa, Homo Sapiens
FAEEQTLVL

SEQ ID NO: 141466 - protein, 9 aa, Homo Sapiens
FAEEVGAAL

SEQ ID NO: 141467 - protein, 9 aa, Homo Sapiens
FAEGFVKAL

SEQ ID NO: 141468 - protein, 9 aa, Homo Sapiens
FAEGFVRAL

SEQ ID NO: 141469 - protein, 9 aa, Homo Sapiens
FAEGKPLAL

SEQ ID NO: 141470 - protein, 9 aa, Homo Sapiens
FAEGKPLEL

SEQ ID NO: 141471 - protein, 9 aa, Homo Sapiens
FAEGSTLKL

SEQ ID NO: 141472 - protein, 9 aa, Homo Sapiens
FAEPGRVPF

SEQ ID NO: 141473 - protein, 9 aa, Homo Sapiens
FAESLRTSL

SEQ ID NO: 141474 - protein, 9 aa, Homo Sapiens
FAFDEIVAL

SEQ ID NO: 141475 - protein, 9 aa, Homo Sapiens
FAFESVVAI

SEQ ID NO: 141476 - protein, 9 aa, Homo Sapiens
FAFGSPIGM

SEQ ID NO: 141477 - protein, 9 aa, Homo Sapiens
FAFIQHPSL

SEQ ID NO: 141478 - protein, 9 aa, Homo Sapiens
FAFLTGVGL

SEQ ID NO: 141479 - protein, 9 aa, Homo Sapiens
FAFPGEILM

SEQ ID NO: 141480 - protein, 9 aa, Homo Sapiens
FAFRNFLYL

SEQ ID NO: 141481 - protein, 9 aa, Homo Sapiens
FAGDIANQL

SEQ ID NO: 141482 - protein, 9 aa, Homo Sapiens
FAGFPSAAA

SEQ ID NO: 141483 - protein, 9 aa, Homo Sapiens
FAGGHPAQL

SEQ ID NO: 141484 - protein, 9 aa, Homo Sapiens
FAGLVFLHL

SEQ ID NO: 141485 - protein, 9 aa, Homo Sapiens
FAGVERLAL

SEQ ID NO: 141486 - protein, 9 aa, Homo Sapiens
FAHDSTRVI

SEQ ID NO: 141487 - protein, 9 aa, Homo Sapiens
FAHLNSPQL

SEQ ID NO: 141488 - protein, 9 aa, Homo Sapiens
FAHLRLEVL

SEQ ID NO: 141489 - protein, 9 aa, Homo Sapiens
FAHPPLLVL

SEQ ID NO: 141490 - protein, 9 aa, Homo Sapiens
FAHPYQYEL

SEQ ID NO: 141491 - protein, 9 aa, Homo Sapiens
FAHTNVESL

SEQ ID NO: 141492 - protein, 9 aa, Homo Sapiens
FAIDPHLLL

SEQ ID NO: 141493 - protein, 9 aa, Homo Sapiens
FAIGLTPML

SEQ ID NO: 141494 - protein, 9 aa, Homo Sapiens
FAIGVNFLI

SEQ ID NO: 141495 - protein, 9 aa, Homo Sapiens
FAIHKKIVL

SEQ ID NO: 141496 - protein, 9 aa, Homo Sapiens
FAIKSLRKL

SEQ ID NO: 141497 - protein, 9 aa, Homo Sapiens
FAILIHDVL

SEQ ID NO: 141498 - protein, 9 aa, Homo Sapiens
FAILRQAEL

SEQ ID NO: 141499 - protein, 9 aa, Homo Sapiens
FAINNSKSF

SEQ ID NO: 141500 - protein, 9 aa, Homo Sapiens
FAIPGSSFL

SEQ ID NO: 141501 - protein, 9 aa, Homo Sapiens
FAIPLIEKL

SEQ ID NO: 141502 - protein, 9 aa, Homo Sapiens
FAIPMIHAV

SEQ ID NO: 141503 - protein, 9 aa, Homo Sapiens
FAIQKGLQA

SEQ ID NO: 141504 - protein, 9 aa, Homo Sapiens
FAISILQQI

SEQ ID NO: 141505 - protein, 9 aa, Homo Sapiens
FAIYKMSFF

SEQ ID NO: 141506 - protein, 9 aa, Homo Sapiens
FAKPENIDL

SEQ ID NO: 141507 - protein, 9 aa, Homo Sapiens
FALDMKYAL

SEQ ID NO: 141508 - protein, 9 aa, Homo Sapiens
FALDSGLEI

SEQ ID NO: 141509 - protein, 9 aa, Homo Sapiens
FALGSPIAM

SEQ ID NO: 141510 - protein, 9 aa, Homo Sapiens
FALGVYRTL

SEQ ID NO: 141511 - protein, 9 aa, Homo Sapiens
FALKGLRTL

SEQ ID NO: 141512 - protein, 9 aa, Homo Sapiens
FALLAGTAV

SEQ ID NO: 141513 - protein, 9 aa, Homo Sapiens
FALLTTPEM

SEQ ID NO: 141514 - protein, 9 aa, Homo Sapiens
FALNLFKHL

SEQ ID NO: 141515 - protein, 9 aa, Homo Sapiens
FALPAYHTL

SEQ ID NO: 141516 - protein, 9 aa, Homo Sapiens
FALPFGRTA

SEQ ID NO: 141517 - protein, 9 aa, Homo Sapiens
FALPGNSQL

SEQ ID NO: 141518 - protein, 9 aa, Homo Sapiens
FALPILNAL

SEQ ID NO: 141519 - protein, 9 aa, Homo Sapiens
FALPYIRDV

SEQ ID NO: 141520 - protein, 9 aa, Homo Sapiens
FALPYVIVL

SEQ ID NO: 141521 - protein, 9 aa, Homo Sapiens
FALRPTFDL

SEQ ID NO: 141522 - protein, 9 aa, Homo Sapiens
FALSGPLFL

SEQ ID NO: 141523 - protein, 9 aa, Homo Sapiens
FALSQPRAM

SEQ ID NO: 141524 - protein, 9 aa, Homo Sapiens
FALSVTNPL

SEQ ID NO: 141525 - protein, 9 aa, Homo Sapiens
FALVGSYTL

SEQ ID NO: 141526 - protein, 9 aa, Homo Sapiens
FAMAGHENL

SEQ ID NO: 141527 - protein, 9 aa, Homo Sapiens
FAMDVYKNL

SEQ ID NO: 141528 - protein, 9 aa, Homo Sapiens
FAMEIDPSL

SEQ ID NO: 141529 - protein, 9 aa, Homo Sapiens
FAMFSGTHV

SEQ ID NO: 141530 - protein, 9 aa, Homo Sapiens
FAMIPAKEA

SEQ ID NO: 141531 - protein, 9 aa, Homo Sapiens
FAMIVSSAL

SEQ ID NO: 141532 - protein, 9 aa, Homo Sapiens
FAMPPPHGM

SEQ ID NO: 141533 - protein, 9 aa, Homo Sapiens
FAMPYFIQV

SEQ ID NO: 141534 - protein, 9 aa, Homo Sapiens
FAMQLVKIL

SEQ ID NO: 141535 - protein, 9 aa, Homo Sapiens
FAMYPPSMI

SEQ ID NO: 141536 - protein, 9 aa, Homo Sapiens
FANEPFADF

SEQ ID NO: 141537 - protein, 9 aa, Homo Sapiens
FANFGVLRL

SEQ ID NO: 141538 - protein, 9 aa, Homo Sapiens
FANLKYVSL

SEQ ID NO: 141539 - protein, 9 aa, Homo Sapiens
FANMLGVSL

SEQ ID NO: 141540 - protein, 9 aa, Homo Sapiens
FANNVQLSL

SEQ ID NO: 141541 - protein, 9 aa, Homo Sapiens
FAQAPQLSV

SEQ ID NO: 141542 - protein, 9 aa, Homo Sapiens
FAQEAISVL

SEQ ID NO: 141543 - protein, 9 aa, Homo Sapiens
FAQEALTVL

SEQ ID NO: 141544 - protein, 9 aa, Homo Sapiens
FAQGDVITL

SEQ ID NO: 141545 - protein, 9 aa, Homo Sapiens
FAQHGGIYV

SEQ ID NO: 141546 - protein, 9 aa, Homo Sapiens
FAQKSGYFL

SEQ ID NO: 141547 - protein, 9 aa, Homo Sapiens
FAQMYQKTL

SEQ ID NO: 141548 - protein, 9 aa, Homo Sapiens
FAQPSGLSL

SEQ ID NO: 141549 - protein, 9 aa, Homo Sapiens
FAQQMQLML

SEQ ID NO: 141550 - protein, 9 aa, Homo Sapiens
FAQTLHPSL

SEQ ID NO: 141551 - protein, 9 aa, Homo Sapiens
FASDIAPFL

SEQ ID NO: 141552 - protein, 9 aa, Homo Sapiens
FASDVQFVL

SEQ ID NO: 141553 - protein, 9 aa, Homo Sapiens
FASELSRSL

SEQ ID NO: 141554 - protein, 9 aa, Homo Sapiens
FASETNLDF

SEQ ID NO: 141555 - protein, 9 aa, Homo Sapiens
FASEVSNVL

SEQ ID NO: 141556 - protein, 9 aa, Homo Sapiens
FASEYPLIL

SEQ ID NO: 141557 - protein, 9 aa, Homo Sapiens
FASFPHMVL

SEQ ID NO: 141558 - protein, 9 aa, Homo Sapiens
FASGAFLHI

SEQ ID NO: 141559 - protein, 9 aa, Homo Sapiens
FASHVSPEV

SEQ ID NO: 141560 - protein, 9 aa, Homo Sapiens
FASIPGLEF

SEQ ID NO: 141561 - protein, 9 aa, Homo Sapiens
FASLPDPVL

SEQ ID NO: 141562 - protein, 9 aa, Homo Sapiens
FASSPLRVL

SEQ ID NO: 141563 - protein, 9 aa, Homo Sapiens
FASTILHLV

SEQ ID NO: 141564 - protein, 9 aa, Homo Sapiens
FASTMVHAL

SEQ ID NO: 141565 - protein, 9 aa, Homo Sapiens
FATDAILAT

SEQ ID NO: 141566 - protein, 9 aa, Homo Sapiens
FATDSGLEF

SEQ ID NO: 141567 - protein, 9 aa, Homo Sapiens
FATEGLRTL

SEQ ID NO: 141568 - protein, 9 aa, Homo Sapiens
FATEVRAVI

SEQ ID NO: 141569 - protein, 9 aa, Homo Sapiens
FATFPSSAF

SEQ ID NO: 141570 - protein, 9 aa, Homo Sapiens
FATGVWHQM

SEQ ID NO: 141571 - protein, 9 aa, Homo Sapiens
FATIKSASL

SEQ ID NO: 141572 - protein, 9 aa, Homo Sapiens
FATIRTASL

SEQ ID NO: 141573 - protein, 9 aa, Homo Sapiens
FATMVRPVA

SEQ ID NO: 141574 - protein, 9 aa, Homo Sapiens
FATSTEPVL

SEQ ID NO: 141575 - protein, 9 aa, Homo Sapiens
FATTSPLVL

SEQ ID NO: 141576 - protein, 9 aa, Homo Sapiens
FAVALPQLL

SEQ ID NO: 141577 - protein, 9 aa, Homo Sapiens
FAVDREARL

SEQ ID NO: 141578 - protein, 9 aa, Homo Sapiens
FAVEEGDHL

SEQ ID NO: 141579 - protein, 9 aa, Homo Sapiens
FAVEYFTRL

SEQ ID NO: 141580 - protein, 9 aa, Homo Sapiens
FAVGPGHGI

SEQ ID NO: 141581 - protein, 9 aa, Homo Sapiens
FAVGSFHTL

SEQ ID NO: 141582 - protein, 9 aa, Homo Sapiens
FAVGVQQVL

SEQ ID NO: 141583 - protein, 9 aa, Homo Sapiens
FAVIAHVGM

SEQ ID NO: 141584 - protein, 9 aa, Homo Sapiens
FAVISRHSL

SEQ ID NO: 141585 - protein, 9 aa, Homo Sapiens
FAVLEDHTL

SEQ ID NO: 141586 - protein, 9 aa, Homo Sapiens
FAVLPRLLL

SEQ ID NO: 141587 - protein, 9 aa, Homo Sapiens
FAVNMFRTL

SEQ ID NO: 141588 - protein, 9 aa, Homo Sapiens
FAVPENSSV

SEQ ID NO: 141589 - protein, 9 aa, Homo Sapiens
FAVPESDHL

SEQ ID NO: 141590 - protein, 9 aa, Homo Sapiens
FAVPKNYKL

SEQ ID NO: 141591 - protein, 9 aa, Homo Sapiens
FAVSDGLEL

SEQ ID NO: 141592 - protein, 9 aa, Homo Sapiens
FAVTLETVL

SEQ ID NO: 141593 - protein, 9 aa, Homo Sapiens
FAVVPSTAT

SEQ ID NO: 141594 - protein, 9 aa, Homo Sapiens
FAVYIHALL

SEQ ID NO: 141595 - protein, 9 aa, Homo Sapiens
FAWPQPASL

SEQ ID NO: 141596 - protein, 9 aa, Homo Sapiens
FAYEGPMYL

SEQ ID NO: 141597 - protein, 9 aa, Homo Sapiens
FAYLRDLLI

SEQ ID NO: 141598 - protein, 9 aa, Homo Sapiens
FAYMPNNSL

SEQ ID NO: 141599 - protein, 9 aa, Homo Sapiens
FAYNFREEL

SEQ ID NO: 141600 - protein, 9 aa, Homo Sapiens
FAYPAIRYL

SEQ ID NO: 141601 - protein, 9 aa, Homo Sapiens
FAYPAPLEV

SEQ ID NO: 141602 - protein, 9 aa, Homo Sapiens
FAYRGFKYL

SEQ ID NO: 141603 - protein, 9 aa, Homo Sapiens
FAYTARISV

SEQ ID NO: 141604 - protein, 9 aa, Homo Sapiens
FAYTRLQLL

SEQ ID NO: 141605 - protein, 9 aa, Homo Sapiens
FAYTVKYVL

SEQ ID NO: 141606 - protein, 9 aa, Homo Sapiens
FAYVEGESL

SEQ ID NO: 141607 - protein, 9 aa, Homo Sapiens
FCEKSFRQL

SEQ ID NO: 141608 - protein, 9 aa, Homo Sapiens
FCIEVGKNL

SEQ ID NO: 141609 - protein, 9 aa, Homo Sapiens
FCIQVGRTM

SEQ ID NO: 141610 - protein, 9 aa, Homo Sapiens
FCMDRALEF

SEQ ID NO: 141611 - protein, 9 aa, Homo Sapiens
FGDIFLHLL

SEQ ID NO: 141612 - protein, 9 aa, Homo Sapiens
FGDVTAHLL

SEQ ID NO: 141613 - protein, 9 aa, Homo Sapiens
FGEMGGKFM

SEQ ID NO: 141614 - protein, 9 aa, Homo Sapiens
FGFSHLEAL

SEQ ID NO: 141615 - protein, 9 aa, Homo Sapiens
FGFSSGAFL

SEQ ID NO: 141616 - protein, 9 aa, Homo Sapiens
FGGPEVLKL

SEQ ID NO: 141617 - protein, 9 aa, Homo Sapiens
FGHYQQAEL

SEQ ID NO: 141618 - protein, 9 aa, Homo Sapiens
FGIDKSKSI

SEQ ID NO: 141619 - protein, 9 aa, Homo Sapiens
FGIDPIWSL

SEQ ID NO: 141620 - protein, 9 aa, Homo Sapiens
FGIDRPAEL

SEQ ID NO: 141621 - protein, 9 aa, Homo Sapiens
FGINHGIEL

SEQ ID NO: 141622 - protein, 9 aa, Homo Sapiens
FGLARAFSL

SEQ ID NO: 141623 - protein, 9 aa, Homo Sapiens
FGLNIFHQL

SEQ ID NO: 141624 - protein, 9 aa, Homo Sapiens
FGLPRWVTL

SEQ ID NO: 141625 - protein, 9 aa, Homo Sapiens
FGMQARYSL

SEQ ID NO: 141626 - protein, 9 aa, Homo Sapiens
FGNGWIPTL

SEQ ID NO: 141627 - protein, 9 aa, Homo Sapiens
FGNNKLTTF

SEQ ID NO: 141628 - protein, 9 aa, Homo Sapiens
FGNPRKPVL

SEQ ID NO: 141629 - protein, 9 aa, Homo Sapiens
FGSDISPEI

SEQ ID NO: 141630 - protein, 9 aa, Homo Sapiens
FGSEFSPEL

SEQ ID NO: 141631 - protein, 9 aa, Homo Sapiens
FGSQPGLYL

SEQ ID NO: 141632 - protein, 9 aa, Homo Sapiens
FGVDPYNVL

SEQ ID NO: 141633 - protein, 9 aa, Homo Sapiens
FGVFSGHTL

SEQ ID NO: 141634 - protein, 9 aa, Homo Sapiens
FGVIPSTPL

SEQ ID NO: 141635 - protein, 9 aa, Homo Sapiens
FGVPVVVAL

SEQ ID NO: 141636 - protein, 9 aa, Homo Sapiens
FGWSHLEAL

SEQ ID NO: 141637 - protein, 9 aa, Homo Sapiens
FGYDYPSVL

SEQ ID NO: 141638 - protein, 9 aa, Homo Sapiens
FGYPDPTYL

SEQ ID NO: 141639 - protein, 9 aa, Homo Sapiens
FIADHCPTL

SEQ ID NO: 141640 - protein, 9 aa, Homo Sapiens
FIAEHYMFL

SEQ ID NO: 141641 - protein, 9 aa, Homo Sapiens
FIAPSGHGL

SEQ ID NO: 141642 - protein, 9 aa, Homo Sapiens
FIAPTGHSL

SEQ ID NO: 141643 - protein, 9 aa, Homo Sapiens
FICDSSPML

SEQ ID NO: 141644 - protein, 9 aa, Homo Sapiens
FIDGGGSVL

SEQ ID NO: 141645 - protein, 9 aa, Homo Sapiens
FIDGHFVEM

SEQ ID NO: 141646 - protein, 9 aa, Homo Sapiens
FIDTAQHML

SEQ ID NO: 141647 - protein, 9 aa, Homo Sapiens
FIEDAVHVL

SEQ ID NO: 141648 - protein, 9 aa, Homo Sapiens
FIEPNVRFW

SEQ ID NO: 141649 - protein, 9 aa, Homo Sapiens
FIFLPGNTL

SEQ ID NO: 141650 - protein, 9 aa, Homo Sapiens
FIFSDTHEL

SEQ ID NO: 141651 - protein, 9 aa, Homo Sapiens
FIGDSGIPL

SEQ ID NO: 141652 - protein, 9 aa, Homo Sapiens
FIIDGKGVL

SEQ ID NO: 141653 - protein, 9 aa, Homo Sapiens
FIIISSQHL

SEQ ID NO: 141654 - protein, 9 aa, Homo Sapiens
FIIQGLRSV

SEQ ID NO: 141655 - protein, 9 aa, Homo Sapiens
FIISRTQAL

SEQ ID NO: 141656 - protein, 9 aa, Homo Sapiens
FIIYDTHSL

SEQ ID NO: 141657 - protein, 9 aa, Homo Sapiens
FILEHIMVI

SEQ ID NO: 141658 - protein, 9 aa, Homo Sapiens
FILEHIMVV

SEQ ID NO: 141659 - protein, 9 aa, Homo Sapiens
FILEPRSFL

SEQ ID NO: 141660 - protein, 9 aa, Homo Sapiens
FILGHLRTL

SEQ ID NO: 141661 - protein, 9 aa, Homo Sapiens
FILQPIHNL

SEQ ID NO: 141662 - protein, 9 aa, Homo Sapiens
FIMDESNVL

SEQ ID NO: 141663 - protein, 9 aa, Homo Sapiens
FIMDRAQAL

SEQ ID NO: 141664 - protein, 9 aa, Homo Sapiens
FIMSATPTM

SEQ ID NO: 141665 - protein, 9 aa, Homo Sapiens
FINGDISSL

SEQ ID NO: 141666 - protein, 9 aa, Homo Sapiens
FIPATGHSL

SEQ ID NO: 141667 - protein, 9 aa, Homo Sapiens
FIQAVRQTL

SEQ ID NO: 141668 - protein, 9 aa, Homo Sapiens
FISGHTSEL

SEQ ID NO: 141669 - protein, 9 aa, Homo Sapiens
FISHLFMQL

SEQ ID NO: 141670 - protein, 9 aa, Homo Sapiens
FISNVKTAL

SEQ ID NO: 141671 - protein, 9 aa, Homo Sapiens
FISPTGHSL

SEQ ID NO: 141672 - protein, 9 aa, Homo Sapiens
FITESYQTL

SEQ ID NO: 141673 - protein, 9 aa, Homo Sapiens
FITPTGHSL

SEQ ID NO: 141674 - protein, 9 aa, Homo Sapiens
FIVAEGDSL

SEQ ID NO: 141675 - protein, 9 aa, Homo Sapiens
FIVDARPAM

SEQ ID NO: 141676 - protein, 9 aa, Homo Sapiens
FIVEETLPL

SEQ ID NO: 141677 - protein, 9 aa, Homo Sapiens
FIVVNTQSL

SEQ ID NO: 141678 - protein, 9 aa, Homo Sapiens
FIYHLPQEF

SEQ ID NO: 141679 - protein, 9 aa, Homo Sapiens
FIYTSELEL

SEQ ID NO: 141680 - protein, 9 aa, Homo Sapiens
FLADPVSNM

SEQ ID NO: 141681 - protein, 9 aa, Homo Sapiens
FLAEAARSL

SEQ ID NO: 141682 - protein, 9 aa, Homo Sapiens
FLANVSTVL

SEQ ID NO: 141683 - protein, 9 aa, Homo Sapiens
FLDEKTHEL

SEQ ID NO: 141684 - protein, 9 aa, Homo Sapiens
FLEEANRVL

SEQ ID NO: 141685 - protein, 9 aa, Homo Sapiens
FLEGRHAEL

SEQ ID NO: 141686 - protein, 9 aa, Homo Sapiens
FLENHVRHL

SEQ ID NO: 141687 - protein, 9 aa, Homo Sapiens
FLFDHLLTL

SEQ ID NO: 141688 - protein, 9 aa, Homo Sapiens
FLFDHQMVL

SEQ ID NO: 141689 - protein, 9 aa, Homo Sapiens
FLFPPAESL

SEQ ID NO: 141690 - protein, 9 aa, Homo Sapiens
FLFSKFIEL

SEQ ID NO: 141691 - protein, 9 aa, Homo Sapiens
FLHPHLLVL

SEQ ID NO: 141692 - protein, 9 aa, Homo Sapiens
FLIDNGVSL

SEQ ID NO: 141693 - protein, 9 aa, Homo Sapiens
FLIIPLHSL

SEQ ID NO: 141694 - protein, 9 aa, Homo Sapiens
FLINFIHTL

SEQ ID NO: 141695 - protein, 9 aa, Homo Sapiens
FLIPFVITV

SEQ ID NO: 141696 - protein, 9 aa, Homo Sapiens
FLIPKFFEL

SEQ ID NO: 141697 - protein, 9 aa, Homo Sapiens
FLIRESETL

SEQ ID NO: 141698 - protein, 9 aa, Homo Sapiens
FLLEGIRSL

SEQ ID NO: 141699 - protein, 9 aa, Homo Sapiens
FLLEHIRIL

SEQ ID NO: 141700 - protein, 9 aa, Homo Sapiens
FLLEKPFSV

SEQ ID NO: 141701 - protein, 9 aa, Homo Sapiens
FLLPVINEM

SEQ ID NO: 141702 - protein, 9 aa, Homo Sapiens
FLLQHVQEL

SEQ ID NO: 141703 - protein, 9 aa, Homo Sapiens
FLMPTSSEL

SEQ ID NO: 141704 - protein, 9 aa, Homo Sapiens
FLNPAQRAL

SEQ ID NO: 141705 - protein, 9 aa, Homo Sapiens
FLNQPHMVL

SEQ ID NO: 141706 - protein, 9 aa, Homo Sapiens
FLPEAPAEL

SEQ ID NO: 141707 - protein, 9 aa, Homo Sapiens
FLQDTRLAL

SEQ ID NO: 141708 - protein, 9 aa, Homo Sapiens
FLQEHNTTL

SEQ ID NO: 141709 - protein, 9 aa, Homo Sapiens
FLQTPLTEL

SEQ ID NO: 141710 - protein, 9 aa, Homo Sapiens
FLVDPNLDL

SEQ ID NO: 141711 - protein, 9 aa, Homo Sapiens
FLVEHNLVL

SEQ ID NO: 141712 - protein, 9 aa, Homo Sapiens
FLVEHVLTL

SEQ ID NO: 141713 - protein, 9 aa, Homo Sapiens
FLVTVIHTL

SEQ ID NO: 141714 - protein, 9 aa, Homo Sapiens
FLYAGHIFL

SEQ ID NO: 141715 - protein, 9 aa, Homo Sapiens
FLYDKALTF

SEQ ID NO: 141716 - protein, 9 aa, Homo Sapiens
FLYDTHQNL

SEQ ID NO: 141717 - protein, 9 aa, Homo Sapiens
FLYPFFGVL

SEQ ID NO: 141718 - protein, 9 aa, Homo Sapiens
FLYPFPLAL

SEQ ID NO: 141719 - protein, 9 aa, Homo Sapiens
FLYSGHLAL

SEQ ID NO: 141720 - protein, 9 aa, Homo Sapiens
FMEETERSL

SEQ ID NO: 141721 - protein, 9 aa, Homo Sapiens
FMNPHLISV

SEQ ID NO: 141722 - protein, 9 aa, Homo Sapiens
FMSDLMKAL

SEQ ID NO: 141723 - protein, 9 aa, Homo Sapiens
FMVEKGPTL

SEQ ID NO: 141724 - protein, 9 aa, Homo Sapiens
FNDPVAMVL

SEQ ID NO: 141725 - protein, 9 aa, Homo Sapiens
FNYPGGVAM

SEQ ID NO: 141726 - protein, 9 aa, Homo Sapiens
FQAPTAKEM

SEQ ID NO: 141727 - protein, 9 aa, Homo Sapiens
FQDAVNKVL

SEQ ID NO: 141728 - protein, 9 aa, Homo Sapiens
FQEADSPTL

SEQ ID NO: 141729 - protein, 9 aa, Homo Sapiens
FQEPDIHFL

SEQ ID NO: 141730 - protein, 9 aa, Homo Sapiens
FQFGVPQAL

SEQ ID NO: 141731 - protein, 9 aa, Homo Sapiens
FQIQTSTSL

SEQ ID NO: 141732 - protein, 9 aa, Homo Sapiens
FQLEHIMDL

SEQ ID NO: 141733 - protein, 9 aa, Homo Sapiens
FQMESQKFL

SEQ ID NO: 141734 - protein, 9 aa, Homo Sapiens
FQMQTTYVL

SEQ ID NO: 141735 - protein, 9 aa, Homo Sapiens
FQNPFRSEL

SEQ ID NO: 141736 - protein, 9 aa, Homo Sapiens
FQNPSTVTL

SEQ ID NO: 141737 - protein, 9 aa, Homo Sapiens
FQSSAVMAL

SEQ ID NO: 141738 - protein, 9 aa, Homo Sapiens
FQTEVGKQL

SEQ ID NO: 141739 - protein, 9 aa, Homo Sapiens
FQTHTTPVL

SEQ ID NO: 141740 - protein, 9 aa, Homo Sapiens
FQTIARNAL

SEQ ID NO: 141741 - protein, 9 aa, Homo Sapiens
FQVNHTVAL

SEQ ID NO: 141742 - protein, 9 aa, Homo Sapiens
FQYPAESVL

SEQ ID NO: 141743 - protein, 9 aa, Homo Sapiens
FQYPDTRYL

SEQ ID NO: 141744 - protein, 9 aa, Homo Sapiens
FQYSKSPSL

SEQ ID NO: 141745 - protein, 9 aa, Homo Sapiens
FQYSSHVSL

SEQ ID NO: 141746 - protein, 9 aa, Homo Sapiens
FSADGHTML

SEQ ID NO: 141747 - protein, 9 aa, Homo Sapiens
FSAGEPRVL

SEQ ID NO: 141748 - protein, 9 aa, Homo Sapiens
FSDDSDLQL

SEQ ID NO: 141749 - protein, 9 aa, Homo Sapiens
FSDFEARQL

SEQ ID NO: 141750 - protein, 9 aa, Homo Sapiens
FSDLTMHEL

SEQ ID NO: 141751 - protein, 9 aa, Homo Sapiens
FSDPIHPQL

SEQ ID NO: 141752 - protein, 9 aa, Homo Sapiens
FSDPVYKEI

SEQ ID NO: 141753 - protein, 9 aa, Homo Sapiens
FSEEDYRTL

SEQ ID NO: 141754 - protein, 9 aa, Homo Sapiens
FSEEMNRVL

SEQ ID NO: 141755 - protein, 9 aa, Homo Sapiens
FSEGGERLL

SEQ ID NO: 141756 - protein, 9 aa, Homo Sapiens
FSEGLIKAL

SEQ ID NO: 141757 - protein, 9 aa, Homo Sapiens
FSEPFHLIV

SEQ ID NO: 141758 - protein, 9 aa, Homo Sapiens
FSESHLVII

SEQ ID NO: 141759 - protein, 9 aa, Homo Sapiens
FSFDGPEIM

SEQ ID NO: 141760 - protein, 9 aa, Homo Sapiens
FSFEAQGGL

SEQ ID NO: 141761 - protein, 9 aa, Homo Sapiens
FSFHHVLSL

SEQ ID NO: 141762 - protein, 9 aa, Homo Sapiens
FSFLPTRAL

SEQ ID NO: 141763 - protein, 9 aa, Homo Sapiens
FSFPEPEAL

SEQ ID NO: 141764 - protein, 9 aa, Homo Sapiens
FSFVRITAL

SEQ ID NO: 141765 - protein, 9 aa, Homo Sapiens
FSFVRVISL

SEQ ID NO: 141766 - protein, 9 aa, Homo Sapiens
FSHAQTVVL

SEQ ID NO: 141767 - protein, 9 aa, Homo Sapiens
FSHHRVTVL

SEQ ID NO: 141768 - protein, 9 aa, Homo Sapiens
FSHPQAAQL

SEQ ID NO: 141769 - protein, 9 aa, Homo Sapiens
FSHPREPAL

SEQ ID NO: 141770 - protein, 9 aa, Homo Sapiens
FSIADSIEL

SEQ ID NO: 141771 - protein, 9 aa, Homo Sapiens
FSIDPARTL

SEQ ID NO: 141772 - protein, 9 aa, Homo Sapiens
FSIDSPDSL

SEQ ID NO: 141773 - protein, 9 aa, Homo Sapiens
FSIEPWLKV

SEQ ID NO: 141774 - protein, 9 aa, Homo Sapiens
FSIGADTAL

SEQ ID NO: 141775 - protein, 9 aa, Homo Sapiens
FSIGVGSRL

SEQ ID NO: 141776 - protein, 9 aa, Homo Sapiens
FSINPLENL

SEQ ID NO: 141777 - protein, 9 aa, Homo Sapiens
FSIPFAPHI

SEQ ID NO: 141778 - protein, 9 aa, Homo Sapiens
FSIPILMQL

SEQ ID NO: 141779 - protein, 9 aa, Homo Sapiens
FSIPVVSDV

SEQ ID NO: 141780 - protein, 9 aa, Homo Sapiens
FSITPLSEL

SEQ ID NO: 141781 - protein, 9 aa, Homo Sapiens
FSLAPITKL

SEQ ID NO: 141782 - protein, 9 aa, Homo Sapiens
FSLDLVHTL

SEQ ID NO: 141783 - protein, 9 aa, Homo Sapiens
FSLLPLSHL

SEQ ID NO: 141784 - protein, 9 aa, Homo Sapiens
FSLPHPEAL

SEQ ID NO: 141785 - protein, 9 aa, Homo Sapiens
FSLPPGHAV

SEQ ID NO: 141786 - protein, 9 aa, Homo Sapiens
FSMDIIDSL

SEQ ID NO: 141787 - protein, 9 aa, Homo Sapiens
FSMEEGDVL

SEQ ID NO: 141788 - protein, 9 aa, Homo Sapiens
FSMLESPAL

SEQ ID NO: 141789 - protein, 9 aa, Homo Sapiens
FSNAHINEL

SEQ ID NO: 141790 - protein, 9 aa, Homo Sapiens
FSNGHIKVL

SEQ ID NO: 141791 - protein, 9 aa, Homo Sapiens
FSNPETLDL

SEQ ID NO: 141792 - protein, 9 aa, Homo Sapiens
FSNPRALYL

SEQ ID NO: 141793 - protein, 9 aa, Homo Sapiens
FSQALQHAL

SEQ ID NO: 141794 - protein, 9 aa, Homo Sapiens
FSQEEFRNL

SEQ ID NO: 141795 - protein, 9 aa, Homo Sapiens
FSQIPNNGL

SEQ ID NO: 141796 - protein, 9 aa, Homo Sapiens
FSQKSFLVL

SEQ ID NO: 141797 - protein, 9 aa, Homo Sapiens
FSQPGLRSL

SEQ ID NO: 141798 - protein, 9 aa, Homo Sapiens
FSQPKVTEL

SEQ ID NO: 141799 - protein, 9 aa, Homo Sapiens
FSQPSLTTL

SEQ ID NO: 141800 - protein, 9 aa, Homo Sapiens
FSQPVFPYL

SEQ ID NO: 141801 - protein, 9 aa, Homo Sapiens
FSSAIGLVL

SEQ ID NO: 141802 - protein, 9 aa, Homo Sapiens
FSSANSPFL

SEQ ID NO: 141803 - protein, 9 aa, Homo Sapiens
FSSDNIAVL

SEQ ID NO: 141804 - protein, 9 aa, Homo Sapiens
FSSDVTHEM

SEQ ID NO: 141805 - protein, 9 aa, Homo Sapiens
FSSEVTAAL

SEQ ID NO: 141806 - protein, 9 aa, Homo Sapiens
FSSPHLQML

SEQ ID NO: 141807 - protein, 9 aa, Homo Sapiens
FSSPHLVQV

SEQ ID NO: 141808 - protein, 9 aa, Homo Sapiens
FSSPSFQTL

SEQ ID NO: 141809 - protein, 9 aa, Homo Sapiens
FSTGNFNVL

SEQ ID NO: 141810 - protein, 9 aa, Homo Sapiens
FSTLYGRVL

SEQ ID NO: 141811 - protein, 9 aa, Homo Sapiens
FSTPLNPFL

SEQ ID NO: 141812 - protein, 9 aa, Homo Sapiens
FSTPLNPLL

SEQ ID NO: 141813 - protein, 9 aa, Homo Sapiens
FSTSVVRPF

SEQ ID NO: 141814 - protein, 9 aa, Homo Sapiens
FSTVVIHFL

SEQ ID NO: 141815 - protein, 9 aa, Homo Sapiens
FSVAVSPSL

SEQ ID NO: 141816 - protein, 9 aa, Homo Sapiens
FSVEGQLEF

SEQ ID NO: 141817 - protein, 9 aa, Homo Sapiens
FSVENKWSL

SEQ ID NO: 141818 - protein, 9 aa, Homo Sapiens
FSVEQITAM

SEQ ID NO: 141819 - protein, 9 aa, Homo Sapiens
FSVGLQPTL

SEQ ID NO: 141820 - protein, 9 aa, Homo Sapiens
FSVISSSEV

SEQ ID NO: 141821 - protein, 9 aa, Homo Sapiens
FSVKAGEAL

SEQ ID NO: 141822 - protein, 9 aa, Homo Sapiens
FSVNLFRTL

SEQ ID NO: 141823 - protein, 9 aa, Homo Sapiens
FSVPFHQAL

SEQ ID NO: 141824 - protein, 9 aa, Homo Sapiens
FSVPGGHNL

SEQ ID NO: 141825 - protein, 9 aa, Homo Sapiens
FSVPHTKSL

SEQ ID NO: 141826 - protein, 9 aa, Homo Sapiens
FSVPLPARL

SEQ ID NO: 141827 - protein, 9 aa, Homo Sapiens
FSVVSPSSF

SEQ ID NO: 141828 - protein, 9 aa, Homo Sapiens
FSYAFPKAV

SEQ ID NO: 141829 - protein, 9 aa, Homo Sapiens
FSYAFPKEF

SEQ ID NO: 141830 - protein, 9 aa, Homo Sapiens
FSYEHFYVI

SEQ ID NO: 141831 - protein, 9 aa, Homo Sapiens
FSYEVSRSL

SEQ ID NO: 141832 - protein, 9 aa, Homo Sapiens
FSYHQFIHL

SEQ ID NO: 141833 - protein, 9 aa, Homo Sapiens
FSYITAVTL

SEQ ID NO: 141834 - protein, 9 aa, Homo Sapiens
FSYLNPQEL

SEQ ID NO: 141835 - protein, 9 aa, Homo Sapiens
FSYMSKISL

SEQ ID NO: 141836 - protein, 9 aa, Homo Sapiens
FSYPAGTEL

SEQ ID NO: 141837 - protein, 9 aa, Homo Sapiens
FSYQVASTL

SEQ ID NO: 141838 - protein, 9 aa, Homo Sapiens
FSYTGRVAV

SEQ ID NO: 141839 - protein, 9 aa, Homo Sapiens
FSYVTPRAF

SEQ ID NO: 141840 - protein, 9 aa, Homo Sapiens
FTADPLSLL

SEQ ID NO: 141841 - protein, 9 aa, Homo Sapiens
FTADVRSVL

SEQ ID NO: 141842 - protein, 9 aa, Homo Sapiens
FTAMPPLTL

SEQ ID NO: 141843 - protein, 9 aa, Homo Sapiens
FTAPATVSL

SEQ ID NO: 141844 - protein, 9 aa, Homo Sapiens
FTDASFLTL

SEQ ID NO: 141845 - protein, 9 aa, Homo Sapiens
FTDSGIHII

SEQ ID NO: 141846 - protein, 9 aa, Homo Sapiens
FTEAGLKEL

SEQ ID NO: 141847 - protein, 9 aa, Homo Sapiens
FTEMASRVL

SEQ ID NO: 141848 - protein, 9 aa, Homo Sapiens
FTEQGVRLL

SEQ ID NO: 141849 - protein, 9 aa, Homo Sapiens
FTFPDPPPL

SEQ ID NO: 141850 - protein, 9 aa, Homo Sapiens
FTIDIKSFL

SEQ ID NO: 141851 - protein, 9 aa, Homo Sapiens
FTIEVERAL

SEQ ID NO: 141852 - protein, 9 aa, Homo Sapiens
FTIFRTISV

SEQ ID NO: 141853 - protein, 9 aa, Homo Sapiens
FTIPHTQEA

SEQ ID NO: 141854 - protein, 9 aa, Homo Sapiens
FTIVSPLDI

SEQ ID NO: 141855 - protein, 9 aa, Homo Sapiens
FTLDVMKEL

SEQ ID NO: 141856 - protein, 9 aa, Homo Sapiens
FTLPMMSTL

SEQ ID NO: 141857 - protein, 9 aa, Homo Sapiens
FTLSHITQL

SEQ ID NO: 141858 - protein, 9 aa, Homo Sapiens
FTLVGKVLL

SEQ ID NO: 141859 - protein, 9 aa, Homo Sapiens
FTMDPKLSA

SEQ ID NO: 141860 - protein, 9 aa, Homo Sapiens
FTMKTVLML

SEQ ID NO: 141861 - protein, 9 aa, Homo Sapiens
FTNDKIINL

SEQ ID NO: 141862 - protein, 9 aa, Homo Sapiens
FTNGQTVNL

SEQ ID NO: 141863 - protein, 9 aa, Homo Sapiens
FTNPWTKEL

SEQ ID NO: 141864 - protein, 9 aa, Homo Sapiens
FTNRTVLEL

SEQ ID NO: 141865 - protein, 9 aa, Homo Sapiens
FTSEKFLVM

SEQ ID NO: 141866 - protein, 9 aa, Homo Sapiens
FTSLPGSTM

SEQ ID NO: 141867 - protein, 9 aa, Homo Sapiens
FTSPFCLQV

SEQ ID NO: 141868 - protein, 9 aa, Homo Sapiens
FTTGAIKDL

SEQ ID NO: 141869 - protein, 9 aa, Homo Sapiens
FTTHVMNLL

SEQ ID NO: 141870 - protein, 9 aa, Homo Sapiens
FTVKLPVAL

SEQ ID NO: 141871 - protein, 9 aa, Homo Sapiens
FTVMPGQTL

SEQ ID NO: 141872 - protein, 9 aa, Homo Sapiens
FTVNPKGEL

SEQ ID NO: 141873 - protein, 9 aa, Homo Sapiens
FTVNQQPFL

SEQ ID NO: 141874 - protein, 9 aa, Homo Sapiens
FTVPANQAF

SEQ ID NO: 141875 - protein, 9 aa, Homo Sapiens
FTVPFYKQL

SEQ ID NO: 141876 - protein, 9 aa, Homo Sapiens
FTVPHTHVF

SEQ ID NO: 141877 - protein, 9 aa, Homo Sapiens
FTVPKNRSL

SEQ ID NO: 141878 - protein, 9 aa, Homo Sapiens
FTVPQIIEM

SEQ ID NO: 141879 - protein, 9 aa, Homo Sapiens
FTVRPGELL

SEQ ID NO: 141880 - protein, 9 aa, Homo Sapiens
FTVTVPKDL

SEQ ID NO: 141881 - protein, 9 aa, Homo Sapiens
FTVTVPKEL

SEQ ID NO: 141882 - protein, 9 aa, Homo Sapiens
FTYGLHMIL

SEQ ID NO: 141883 - protein, 9 aa, Homo Sapiens
FTYKGLRAL

SEQ ID NO: 141884 - protein, 9 aa, Homo Sapiens
FVADVRLIF

SEQ ID NO: 141885 - protein, 9 aa, Homo Sapiens
FVAEGGPEL

SEQ ID NO: 141886 - protein, 9 aa, Homo Sapiens
FVAETHIVL

SEQ ID NO: 141887 - protein, 9 aa, Homo Sapiens
FVALPGVAV

SEQ ID NO: 141888 - protein, 9 aa, Homo Sapiens
FVAPPTAAV

SEQ ID NO: 141889 - protein, 9 aa, Homo Sapiens
FVDEGIKTL

SEQ ID NO: 141890 - protein, 9 aa, Homo Sapiens
FVEEEEHFL

SEQ ID NO: 141891 - protein, 9 aa, Homo Sapiens
FVFPGELLL

SEQ ID NO: 141892 - protein, 9 aa, Homo Sapiens
FVHDLVLYL

SEQ ID NO: 141893 - protein, 9 aa, Homo Sapiens
FVHPKPVSL

SEQ ID NO: 141894 - protein, 9 aa, Homo Sapiens
FVIDLQTRL

SEQ ID NO: 141895 - protein, 9 aa, Homo Sapiens
FVIETARQL

SEQ ID NO: 141896 - protein, 9 aa, Homo Sapiens
FVIGNGKNL

SEQ ID NO: 141897 - protein, 9 aa, Homo Sapiens
FVINEVCEM

SEQ ID NO: 141898 - protein, 9 aa, Homo Sapiens
FVIPVVQAL

SEQ ID NO: 141899 - protein, 9 aa, Homo Sapiens
FVLDKVPFL

SEQ ID NO: 141900 - protein, 9 aa, Homo Sapiens
FVLGRLLTL

SEQ ID NO: 141901 - protein, 9 aa, Homo Sapiens
FVMEGVKNL

SEQ ID NO: 141902 - protein, 9 aa, Homo Sapiens
FVMETFVHL

SEQ ID NO: 141903 - protein, 9 aa, Homo Sapiens
FVNPHVSSF

SEQ ID NO: 141904 - protein, 9 aa, Homo Sapiens
FVNPSLRVL

SEQ ID NO: 141905 - protein, 9 aa, Homo Sapiens
FVNPVQVVL

SEQ ID NO: 141906 - protein, 9 aa, Homo Sapiens
FVNSQEWTL

SEQ ID NO: 141907 - protein, 9 aa, Homo Sapiens
FVSDPLSDL

SEQ ID NO: 141908 - protein, 9 aa, Homo Sapiens
FVSPLVKYL

SEQ ID NO: 141909 - protein, 9 aa, Homo Sapiens
FVSSFMSEL

SEQ ID NO: 141910 - protein, 9 aa, Homo Sapiens
FVTEEIIPL

SEQ ID NO: 141911 - protein, 9 aa, Homo Sapiens
FVTKPNSAL

SEQ ID NO: 141912 - protein, 9 aa, Homo Sapiens
FVTSSHLQL

SEQ ID NO: 141913 - protein, 9 aa, Homo Sapiens
FVVDHCPYM

SEQ ID NO: 141914 - protein, 9 aa, Homo Sapiens
FVVDRLIAL

SEQ ID NO: 141915 - protein, 9 aa, Homo Sapiens
FVVERQPCM

SEQ ID NO: 141916 - protein, 9 aa, Homo Sapiens
FVVPDTVDM

SEQ ID NO: 141917 - protein, 9 aa, Homo Sapiens
FVVPNQKEL

SEQ ID NO: 141918 - protein, 9 aa, Homo Sapiens
FVVPNQKRL

SEQ ID NO: 141919 - protein, 9 aa, Homo Sapiens
FVVPRAALL

SEQ ID NO: 141920 - protein, 9 aa, Homo Sapiens
FVVPYGTPL

SEQ ID NO: 141921 - protein, 9 aa, Homo Sapiens
FVYENPISL

SEQ ID NO: 141922 - protein, 9 aa, Homo Sapiens
FVYGESVEL

SEQ ID NO: 141923 - protein, 9 aa, Homo Sapiens
FVYPFGATL

SEQ ID NO: 141924 - protein, 9 aa, Homo Sapiens
FWIPYIHNL

SEQ ID NO: 141925 - protein, 9 aa, Homo Sapiens
FYILTSKEL

SEQ ID NO: 141926 - protein, 9 aa, Homo Sapiens
FYVPFAKAL

SEQ ID NO: 141927 - protein, 9 aa, Homo Sapiens
GAAAPLLPM

SEQ ID NO: 141928 - protein, 9 aa, Homo Sapiens
GAAAWARPL

SEQ ID NO: 141929 - protein, 9 aa, Homo Sapiens
GAADPGFTM

SEQ ID NO: 141930 - protein, 9 aa, Homo Sapiens
GAFQPGRPL

SEQ ID NO: 141931 - protein, 9 aa, Homo Sapiens
GAHFSVSSL

SEQ ID NO: 141932 - protein, 9 aa, Homo Sapiens
GAINHVLQL

SEQ ID NO: 141933 - protein, 9 aa, Homo Sapiens
GAIPAFISL

SEQ ID NO: 141934 - protein, 9 aa, Homo Sapiens
GAIPVFFSF

SEQ ID NO: 141935 - protein, 9 aa, Homo Sapiens
GAISKIFVL

SEQ ID NO: 141936 - protein, 9 aa, Homo Sapiens
GALAVFPSL

SEQ ID NO: 141937 - protein, 9 aa, Homo Sapiens
GALFISPAL

SEQ ID NO: 141938 - protein, 9 aa, Homo Sapiens
GALPYFSEM

SEQ ID NO: 141939 - protein, 9 aa, Homo Sapiens
GAMDLLREL

SEQ ID NO: 141940 - protein, 9 aa, Homo Sapiens
GANHISPFL

SEQ ID NO: 141941 - protein, 9 aa, Homo Sapiens
GASPIGPTL

SEQ ID NO: 141942 - protein, 9 aa, Homo Sapiens
GATKLFLIL

SEQ ID NO: 141943 - protein, 9 aa, Homo Sapiens
GATPVSLAL

SEQ ID NO: 141944 - protein, 9 aa, Homo Sapiens
GAVDPLLAL

SEQ ID NO: 141945 - protein, 9 aa, Homo Sapiens
GAVPIFIEL

SEQ ID NO: 141946 - protein, 9 aa, Homo Sapiens
GAVSPFGML

SEQ ID NO: 141947 - protein, 9 aa, Homo Sapiens
GAYKYIQEL

SEQ ID NO: 141948 - protein, 9 aa, Homo Sapiens
GAYVPSLAL

SEQ ID NO: 141949 - protein, 9 aa, Homo Sapiens
GIIDPGSTV

SEQ ID NO: 141950 - protein, 9 aa, Homo Sapiens
GIIEPLMNL

SEQ ID NO: 141951 - protein, 9 aa, Homo Sapiens
GIIHVISRP

SEQ ID NO: 141952 - protein, 9 aa, Homo Sapiens
GIIRPGTAF

SEQ ID NO: 141953 - protein, 9 aa, Homo Sapiens
GIVFSGSSL

SEQ ID NO: 141954 - protein, 9 aa, Homo Sapiens
GIVGSGAAL

SEQ ID NO: 141955 - protein, 9 aa, Homo Sapiens
GSAPWAPVL

SEQ ID NO: 141956 - protein, 9 aa, Homo Sapiens
GSIAPGLSV

SEQ ID NO: 141957 - protein, 9 aa, Homo Sapiens
GTAPPTLAL

SEQ ID NO: 141958 - protein, 9 aa, Homo Sapiens
GTIPWFMEI

SEQ ID NO: 141959 - protein, 9 aa, Homo Sapiens
GVIDAYMTL

SEQ ID NO: 141960 - protein, 9 aa, Homo Sapiens
GVIEPNKEL

SEQ ID NO: 141961 - protein, 9 aa, Homo Sapiens
GVISKVSTL

SEQ ID NO: 141962 - protein, 9 aa, Homo Sapiens
HAAHIISEL

SEQ ID NO: 141963 - protein, 9 aa, Homo Sapiens
HAASVFLTL

SEQ ID NO: 141964 - protein, 9 aa, Homo Sapiens
HACGVIATI

SEQ ID NO: 141965 - protein, 9 aa, Homo Sapiens
HADDSFLVL

SEQ ID NO: 141966 - protein, 9 aa, Homo Sapiens
HAFAQPFAV

SEQ ID NO: 141967 - protein, 9 aa, Homo Sapiens
HAIEESVVL

SEQ ID NO: 141968 - protein, 9 aa, Homo Sapiens
HAIMRSPQM

SEQ ID NO: 141969 - protein, 9 aa, Homo Sapiens
HAIPPTLAM

SEQ ID NO: 141970 - protein, 9 aa, Homo Sapiens
HAMQFPAEL

SEQ ID NO: 141971 - protein, 9 aa, Homo Sapiens
HAMVILLTL

SEQ ID NO: 141972 - protein, 9 aa, Homo Sapiens
HANPILLLV

SEQ ID NO: 141973 - protein, 9 aa, Homo Sapiens
HASDRIIAL

SEQ ID NO: 141974 - protein, 9 aa, Homo Sapiens
HATQAIFEI

SEQ ID NO: 141975 - protein, 9 aa, Homo Sapiens
HAVEWPVVM

SEQ ID NO: 141976 - protein, 9 aa, Homo Sapiens
HAVHVALVL

SEQ ID NO: 141977 - protein, 9 aa, Homo Sapiens
HFSAYSSLI

SEQ ID NO: 141978 - protein, 9 aa, Homo Sapiens
HIIENIVAV

SEQ ID NO: 141979 - protein, 9 aa, Homo Sapiens
HILDFSPSL

SEQ ID NO: 141980 - protein, 9 aa, Homo Sapiens
HIPVFSPAL

SEQ ID NO: 141981 - protein, 9 aa, Homo Sapiens
HLDEAIHVL

SEQ ID NO: 141982 - protein, 9 aa, Homo Sapiens
HLTPVTLEL

SEQ ID NO: 141983 - protein, 9 aa, Homo Sapiens
HSALPNQSL

SEQ ID NO: 141984 - protein, 9 aa, Homo Sapiens
HSIGSYFTL

SEQ ID NO: 141985 - protein, 9 aa, Homo Sapiens
HSIIPRGSL

SEQ ID NO: 141986 - protein, 9 aa, Homo Sapiens
HTIFPSEYL

SEQ ID NO: 141987 - protein, 9 aa, Homo Sapiens
HTIVPGQVL

SEQ ID NO: 141988 - protein, 9 aa, Homo Sapiens
HVFIGGTPL

SEQ ID NO: 141989 - protein, 9 aa, Homo Sapiens
HVITKTMEL

SEQ ID NO: 141990 - protein, 9 aa, Homo Sapiens
HVLEPLSSL

SEQ ID NO: 141991 - protein, 9 aa, Homo Sapiens
HVMKAMQSL

SEQ ID NO: 141992 - protein, 9 aa, Homo Sapiens
HVPEHAVVL

SEQ ID NO: 141993 - protein, 9 aa, Homo Sapiens
IAAGIFNDL

SEQ ID NO: 141994 - protein, 9 aa, Homo Sapiens
IAAMPLISL

SEQ ID NO: 141995 - protein, 9 aa, Homo Sapiens
IAAPFTSKL

SEQ ID NO: 141996 - protein, 9 aa, Homo Sapiens
IAAPNMKAM

SEQ ID NO: 141997 - protein, 9 aa, Homo Sapiens
IAAPTSSAL

SEQ ID NO: 141998 - protein, 9 aa, Homo Sapiens
IAAVPATAM

SEQ ID NO: 141999 - protein, 9 aa, Homo Sapiens
IAAVTDIPL

SEQ ID NO: 142000 - protein, 9 aa, Homo Sapiens
IADGVFRFL

SEQ ID NO: 142001 - protein, 9 aa, Homo Sapiens
IADLVSKEL

SEQ ID NO: 142002 - protein, 9 aa, Homo Sapiens
IADPFFRSA

SEQ ID NO: 142003 - protein, 9 aa, Homo Sapiens
IADPNIAKL

SEQ ID NO: 142004 - protein, 9 aa, Homo Sapiens
IADSGLKIL

SEQ ID NO: 142005 - protein, 9 aa, Homo Sapiens
IAEMVRHAL

SEQ ID NO: 142006 - protein, 9 aa, Homo Sapiens
IAENLPKQL

SEQ ID NO: 142007 - protein, 9 aa, Homo Sapiens
IAFGPALAL

SEQ ID NO: 142008 - protein, 9 aa, Homo Sapiens
IAFGQSMDL

SEQ ID NO: 142009 - protein, 9 aa, Homo Sapiens
IAFHSAVSL

SEQ ID NO: 142010 - protein, 9 aa, Homo Sapiens
IAFPAAPLL

SEQ ID NO: 142011 - protein, 9 aa, Homo Sapiens
IAFPKAEEL

SEQ ID NO: 142012 - protein, 9 aa, Homo Sapiens
IAFPTSISV

SEQ ID NO: 142013 - protein, 9 aa, Homo Sapiens
IAFQYSTVL

SEQ ID NO: 142014 - protein, 9 aa, Homo Sapiens
IAIAPNGAL

SEQ ID NO: 142015 - protein, 9 aa, Homo Sapiens
IAIDGGKVL

SEQ ID NO: 142016 - protein, 9 aa, Homo Sapiens
IAIEDPFSV

SEQ ID NO: 142017 - protein, 9 aa, Homo Sapiens
IAIEGIMNL

SEQ ID NO: 142018 - protein, 9 aa, Homo Sapiens
IAIGSQPVL

SEQ ID NO: 142019 - protein, 9 aa, Homo Sapiens
IAIIPSKKL

SEQ ID NO: 142020 - protein, 9 aa, Homo Sapiens
IAIKFGSAL

SEQ ID NO: 142021 - protein, 9 aa, Homo Sapiens
IAIKYSRTL

SEQ ID NO: 142022 - protein, 9 aa, Homo Sapiens
IAINISRNL

SEQ ID NO: 142023 - protein, 9 aa, Homo Sapiens
IAIPDASKL

SEQ ID NO: 142024 - protein, 9 aa, Homo Sapiens
IAIPFGTAL

SEQ ID NO: 142025 - protein, 9 aa, Homo Sapiens
IAIPFLIKL

SEQ ID NO: 142026 - protein, 9 aa, Homo Sapiens
IAIPVTQEL

SEQ ID NO: 142027 - protein, 9 aa, Homo Sapiens
IAIPVTVAF

SEQ ID NO: 142028 - protein, 9 aa, Homo Sapiens
IAISRTPVL

SEQ ID NO: 142029 - protein, 9 aa, Homo Sapiens
IALEAAKAL

SEQ ID NO: 142030 - protein, 9 aa, Homo Sapiens
IALGEFSTL

SEQ ID NO: 142031 - protein, 9 aa, Homo Sapiens
IALLKAIIL

SEQ ID NO: 142032 - protein, 9 aa, Homo Sapiens
IAMDLILKM

SEQ ID NO: 142033 - protein, 9 aa, Homo Sapiens
IAMGMAQAL

SEQ ID NO: 142034 - protein, 9 aa, Homo Sapiens
IAMPLHMIF

SEQ ID NO: 142035 - protein, 9 aa, Homo Sapiens
IANAVVKEL

SEQ ID NO: 142036 - protein, 9 aa, Homo Sapiens
IANDRFINM

SEQ ID NO: 142037 - protein, 9 aa, Homo Sapiens
IANPTAMLL

SEQ ID NO: 142038 - protein, 9 aa, Homo Sapiens
IANPTATLL

SEQ ID NO: 142039 - protein, 9 aa, Homo Sapiens
IAQDFKTDL

SEQ ID NO: 142040 - protein, 9 aa, Homo Sapiens
IAQGSYIAL

SEQ ID NO: 142041 - protein, 9 aa, Homo Sapiens
IAQPVRSFL

SEQ ID NO: 142042 - protein, 9 aa, Homo Sapiens
IARLPSSTL

SEQ ID NO: 142043 - protein, 9 aa, Homo Sapiens
IASAIVNEL

SEQ ID NO: 142044 - protein, 9 aa, Homo Sapiens
IASIHSFEL

SEQ ID NO: 142045 - protein, 9 aa, Homo Sapiens
IASPPSLIL

SEQ ID NO: 142046 - protein, 9 aa, Homo Sapiens
IASPVIAAV

SEQ ID NO: 142047 - protein, 9 aa, Homo Sapiens
IASPVQPVL

SEQ ID NO: 142048 - protein, 9 aa, Homo Sapiens
IATNGTPEL

SEQ ID NO: 142049 - protein, 9 aa, Homo Sapiens
IATWGIVVM

SEQ ID NO: 142050 - protein, 9 aa, Homo Sapiens
IAVAITEAL

SEQ ID NO: 142051 - protein, 9 aa, Homo Sapiens
IAVANAQEL

SEQ ID NO: 142052 - protein, 9 aa, Homo Sapiens
IAVDMTQHL

SEQ ID NO: 142053 - protein, 9 aa, Homo Sapiens
IAVEPGNQW

SEQ ID NO: 142054 - protein, 9 aa, Homo Sapiens
IAVGVGAQL

SEQ ID NO: 142055 - protein, 9 aa, Homo Sapiens
IAVPDPSVL

SEQ ID NO: 142056 - protein, 9 aa, Homo Sapiens
IAVPEARFL

SEQ ID NO: 142057 - protein, 9 aa, Homo Sapiens
IAVYHLQEL

SEQ ID NO: 142058 - protein, 9 aa, Homo Sapiens
IAWPPPTEL

SEQ ID NO: 142059 - protein, 9 aa, Homo Sapiens
IAYDVTYSL

SEQ ID NO: 142060 - protein, 9 aa, Homo Sapiens
IAYIRDLAL

SEQ ID NO: 142061 - protein, 9 aa, Homo Sapiens
IAYPKAVTM

SEQ ID NO: 142062 - protein, 9 aa, Homo Sapiens
IGIDHIKEL

SEQ ID NO: 142063 - protein, 9 aa, Homo Sapiens
IGYSSPLTL

SEQ ID NO: 142064 - protein, 9 aa, Homo Sapiens
IIEPSLRQL

SEQ ID NO: 142065 - protein, 9 aa, Homo Sapiens
IIINPSSSL

SEQ ID NO: 142066 - protein, 9 aa, Homo Sapiens
IIIPNPAAL

SEQ ID NO: 142067 - protein, 9 aa, Homo Sapiens
IIITPGYGL

SEQ ID NO: 142068 - protein, 9 aa, Homo Sapiens
IILAPTREL

SEQ ID NO: 142069 - protein, 9 aa, Homo Sapiens
IISPLFAEL

SEQ ID NO: 142070 - protein, 9 aa, Homo Sapiens
IITAFIRAL

SEQ ID NO: 142071 - protein, 9 aa, Homo Sapiens
IITPAFAEL

SEQ ID NO: 142072 - protein, 9 aa, Homo Sapiens
IITTVGPEL

SEQ ID NO: 142073 - protein, 9 aa, Homo Sapiens
IIVDPAREL

SEQ ID NO: 142074 - protein, 9 aa, Homo Sapiens
IIVGNPKAL

SEQ ID NO: 142075 - protein, 9 aa, Homo Sapiens
IIYTAKISL

SEQ ID NO: 142076 - protein, 9 aa, Homo Sapiens
ILNPHGIPL

SEQ ID NO: 142077 - protein, 9 aa, Homo Sapiens
INVEPLSSL

SEQ ID NO: 142078 - protein, 9 aa, Homo Sapiens
IQIERQKIL

SEQ ID NO: 142079 - protein, 9 aa, Homo Sapiens
ISEENFRVM

SEQ ID NO: 142080 - protein, 9 aa, Homo Sapiens
ISFPSPDAL

SEQ ID NO: 142081 - protein, 9 aa, Homo Sapiens
ISGGKPLEV

SEQ ID NO: 142082 - protein, 9 aa, Homo Sapiens
ISIDRFLAV

SEQ ID NO: 142083 - protein, 9 aa, Homo Sapiens
ISIGPGASF

SEQ ID NO: 142084 - protein, 9 aa, Homo Sapiens
ISIGVTQIL

SEQ ID NO: 142085 - protein, 9 aa, Homo Sapiens
ISIHVGQAG

SEQ ID NO: 142086 - protein, 9 aa, Homo Sapiens
ISILQQIEL

SEQ ID NO: 142087 - protein, 9 aa, Homo Sapiens
ISNPNSIIL

SEQ ID NO: 142088 - protein, 9 aa, Homo Sapiens
ISNSHPLSL

SEQ ID NO: 142089 - protein, 9 aa, Homo Sapiens
ISSPVILQF

SEQ ID NO: 142090 - protein, 9 aa, Homo Sapiens
ISSPVVTSL

SEQ ID NO: 142091 - protein, 9 aa, Homo Sapiens
ISTEVNPKL

SEQ ID NO: 142092 - protein, 9 aa, Homo Sapiens
ISTNSHPIL

SEQ ID NO: 142093 - protein, 9 aa, Homo Sapiens
ISVASFQEL

SEQ ID NO: 142094 - protein, 9 aa, Homo Sapiens
ISVQPSSSL

SEQ ID NO: 142095 - protein, 9 aa, Homo Sapiens
ITAPPSRVL

SEQ ID NO: 142096 - protein, 9 aa, Homo Sapiens
ITDFQFKEL

SEQ ID NO: 142097 - protein, 9 aa, Homo Sapiens
ITIKPVLSL

SEQ ID NO: 142098 - protein, 9 aa, Homo Sapiens
ITISPLQEL

SEQ ID NO: 142099 - protein, 9 aa, Homo Sapiens
ITIVKSTEL

SEQ ID NO: 142100 - protein, 9 aa, Homo Sapiens
ITLHVFWEL

SEQ ID NO: 142101 - protein, 9 aa, Homo Sapiens
ITLLREISL

SEQ ID NO: 142102 - protein, 9 aa, Homo Sapiens
ITSDPGLSL

SEQ ID NO: 142103 - protein, 9 aa, Homo Sapiens
ITSPHGIPL

SEQ ID NO: 142104 - protein, 9 aa, Homo Sapiens
ITVGPRGPL

SEQ ID NO: 142105 - protein, 9 aa, Homo Sapiens
ITYGQFAQL

SEQ ID NO: 142106 - protein, 9 aa, Homo Sapiens
IVAEPGAVL

SEQ ID NO: 142107 - protein, 9 aa, Homo Sapiens
IVIDGSGAL

SEQ ID NO: 142108 - protein, 9 aa, Homo Sapiens
IVIDPKNPL

SEQ ID NO: 142109 - protein, 9 aa, Homo Sapiens
IVINPKTTL

SEQ ID NO: 142110 - protein, 9 aa, Homo Sapiens
IVMEHVVFL

SEQ ID NO: 142111 - protein, 9 aa, Homo Sapiens
IVMPLHYSL

SEQ ID NO: 142112 - protein, 9 aa, Homo Sapiens
IVMPNILVL

SEQ ID NO: 142113 - protein, 9 aa, Homo Sapiens
IVNGHTLLV

SEQ ID NO: 142114 - protein, 9 aa, Homo Sapiens
IVVAPSQTL

SEQ ID NO: 142115 - protein, 9 aa, Homo Sapiens
IVVPAGVEL

SEQ ID NO: 142116 - protein, 9 aa, Homo Sapiens
IVYPGIAVF

SEQ ID NO: 142117 - protein, 9 aa, Homo Sapiens
KAAHFFSTL

SEQ ID NO: 142118 - protein, 9 aa, Homo Sapiens
KAASVRPVL

SEQ ID NO: 142119 - protein, 9 aa, Homo Sapiens
KADMNVHLL

SEQ ID NO: 142120 - protein, 9 aa, Homo Sapiens
KAFFTSKAL

SEQ ID NO: 142121 - protein, 9 aa, Homo Sapiens
KAFNWFSTL

SEQ ID NO: 142122 - protein, 9 aa, Homo Sapiens
KAFNYFSSL

SEQ ID NO: 142123 - protein, 9 aa, Homo Sapiens
KAFPASAAL

SEQ ID NO: 142124 - protein, 9 aa, Homo Sapiens
KAFPFHIIF

SEQ ID NO: 142125 - protein, 9 aa, Homo Sapiens
KAFQKIVVL

SEQ ID NO: 142126 - protein, 9 aa, Homo Sapiens
KAIDFAASL

SEQ ID NO: 142127 - protein, 9 aa, Homo Sapiens
KAIDLMNAL

SEQ ID NO: 142128 - protein, 9 aa, Homo Sapiens
KAIEVLLTL

SEQ ID NO: 142129 - protein, 9 aa, Homo Sapiens
KAIGLFISF

SEQ ID NO: 142130 - protein, 9 aa, Homo Sapiens
KAINVFVSA

SEQ ID NO: 142131 - protein, 9 aa, Homo Sapiens
KAIRPYHAL

SEQ ID NO: 142132 - protein, 9 aa, Homo Sapiens
KAISRWSSL

SEQ ID NO: 142133 - protein, 9 aa, Homo Sapiens
KALSIFNEL

SEQ ID NO: 142134 - protein, 9 aa, Homo Sapiens
KAMELIREL

SEQ ID NO: 142135 - protein, 9 aa, Homo Sapiens
KAMEYMFGW

SEQ ID NO: 142136 - protein, 9 aa, Homo Sapiens
KAMPITLHL

SEQ ID NO: 142137 - protein, 9 aa, Homo Sapiens
KANPALYVL

SEQ ID NO: 142138 - protein, 9 aa, Homo Sapiens
KASDLYITL

SEQ ID NO: 142139 - protein, 9 aa, Homo Sapiens
KATFHYRTL

SEQ ID NO: 142140 - protein, 9 aa, Homo Sapiens
KATPQVPVL

SEQ ID NO: 142141 - protein, 9 aa, Homo Sapiens
KAVPSFDSL

SEQ ID NO: 142142 - protein, 9 aa, Homo Sapiens
KAYEIMREL

SEQ ID NO: 142143 - protein, 9 aa, Homo Sapiens
KCLELFSEL

SEQ ID NO: 142144 - protein, 9 aa, Homo Sapiens
KINEAFIEM

SEQ ID NO: 142145 - protein, 9 aa, Homo Sapiens
KITEDFRAL

SEQ ID NO: 142146 - protein, 9 aa, Homo Sapiens
KIVKWDRDM

SEQ ID NO: 142147 - protein, 9 aa, Homo Sapiens
KSIPSFSSL

SEQ ID NO: 142148 - protein, 9 aa, Homo Sapiens
KTIPSWATL

SEQ ID NO: 142149 - protein, 9 aa, Homo Sapiens
LAAAMVRVL

SEQ ID NO: 142150 - protein, 9 aa, Homo Sapiens
LAAEGQLTL

SEQ ID NO: 142151 - protein, 9 aa, Homo Sapiens
LAAGVVSAM

SEQ ID NO: 142152 - protein, 9 aa, Homo Sapiens
LAAHIPLFL

SEQ ID NO: 142153 - protein, 9 aa, Homo Sapiens
LAAHLGSAL

SEQ ID NO: 142154 - protein, 9 aa, Homo Sapiens
LAALLHAIA

SEQ ID NO: 142155 - protein, 9 aa, Homo Sapiens
LAALPGVSL

SEQ ID NO: 142156 - protein, 9 aa, Homo Sapiens
LAALSWQYL

SEQ ID NO: 142157 - protein, 9 aa, Homo Sapiens
LAAPMILSL

SEQ ID NO: 142158 - protein, 9 aa, Homo Sapiens
LAAPSNLSM

SEQ ID NO: 142159 - protein, 9 aa, Homo Sapiens
LAAPSPAAL

SEQ ID NO: 142160 - protein, 9 aa, Homo Sapiens
LAAPVISVL

SEQ ID NO: 142161 - protein, 9 aa, Homo Sapiens
LAAVAHSPL

SEQ ID NO: 142162 - protein, 9 aa, Homo Sapiens
LAAVPVQDL

SEQ ID NO: 142163 - protein, 9 aa, Homo Sapiens
LACIPVQEL

SEQ ID NO: 142164 - protein, 9 aa, Homo Sapiens
LADHTVHVL

SEQ ID NO: 142165 - protein, 9 aa, Homo Sapiens
LADIGYKTF

SEQ ID NO: 142166 - protein, 9 aa, Homo Sapiens
LADPVFRTL

SEQ ID NO: 142167 - protein, 9 aa, Homo Sapiens
LADQKVHML

SEQ ID NO: 142168 - protein, 9 aa, Homo Sapiens
LADVKVHIL

SEQ ID NO: 142169 - protein, 9 aa, Homo Sapiens
LAEAGVRLL

SEQ ID NO: 142170 - protein, 9 aa, Homo Sapiens
LAEFKVRAL

SEQ ID NO: 142171 - protein, 9 aa, Homo Sapiens
LAEIFGKVL

SEQ ID NO: 142172 - protein, 9 aa, Homo Sapiens
LAFEGPILL

SEQ ID NO: 142173 - protein, 9 aa, Homo Sapiens
LAFGSGMGL

SEQ ID NO: 142174 - protein, 9 aa, Homo Sapiens
LAFLGSQSL

SEQ ID NO: 142175 - protein, 9 aa, Homo Sapiens
LAFNSAISL

SEQ ID NO: 142176 - protein, 9 aa, Homo Sapiens
LAFPDVVSL

SEQ ID NO: 142177 - protein, 9 aa, Homo Sapiens
LAFPGEMLL

SEQ ID NO: 142178 - protein, 9 aa, Homo Sapiens
LAFPSPEKL

SEQ ID NO: 142179 - protein, 9 aa, Homo Sapiens
LAFPTGCSL

SEQ ID NO: 142180 - protein, 9 aa, Homo Sapiens
LAFSRALEL

SEQ ID NO: 142181 - protein, 9 aa, Homo Sapiens
LAGPDHLSL

SEQ ID NO: 142182 - protein, 9 aa, Homo Sapiens
LAHLRAAVL

SEQ ID NO: 142183 - protein, 9 aa, Homo Sapiens
LAHPNIIAL

SEQ ID NO: 142184 - protein, 9 aa, Homo Sapiens
LAHPYFESL

SEQ ID NO: 142185 - protein, 9 aa, Homo Sapiens
LAHVVITQL

SEQ ID NO: 142186 - protein, 9 aa, Homo Sapiens
LAIDAIHQL

SEQ ID NO: 142187 - protein, 9 aa, Homo Sapiens
LAIDSIHQL

SEQ ID NO: 142188 - protein, 9 aa, Homo Sapiens
LAIESANEL

SEQ ID NO: 142189 - protein, 9 aa, Homo Sapiens
LAIFVICQL

SEQ ID NO: 142190 - protein, 9 aa, Homo Sapiens
LAIGPCKSL

SEQ ID NO: 142191 - protein, 9 aa, Homo Sapiens
LAIHGMETL

SEQ ID NO: 142192 - protein, 9 aa, Homo Sapiens
LAIIPHVTI

SEQ ID NO: 142193 - protein, 9 aa, Homo Sapiens
LAIPFAITI

SEQ ID NO: 142194 - protein, 9 aa, Homo Sapiens
LAIPVFLTL

SEQ ID NO: 142195 - protein, 9 aa, Homo Sapiens
LAITGGVTL

SEQ ID NO: 142196 - protein, 9 aa, Homo Sapiens
LAITTEHTL

SEQ ID NO: 142197 - protein, 9 aa, Homo Sapiens
LAIVPVNTL

SEQ ID NO: 142198 - protein, 9 aa, Homo Sapiens
LALAIAQEL

SEQ ID NO: 142199 - protein, 9 aa, Homo Sapiens
LALDDVAAL

SEQ ID NO: 142200 - protein, 9 aa, Homo Sapiens
LALDHLHSL

SEQ ID NO: 142201 - protein, 9 aa, Homo Sapiens
LALELHQEL

SEQ ID NO: 142202 - protein, 9 aa, Homo Sapiens
LALFPGVAL

SEQ ID NO: 142203 - protein, 9 aa, Homo Sapiens
LALGSQMTL

SEQ ID NO: 142204 - protein, 9 aa, Homo Sapiens
LALTRSSSL

SEQ ID NO: 142205 - protein, 9 aa, Homo Sapiens
LAMEPTPEL

SEQ ID NO: 142206 - protein, 9 aa, Homo Sapiens
LAMLRSLDL

SEQ ID NO: 142207 - protein, 9 aa, Homo Sapiens
LAMRPLASL

SEQ ID NO: 142208 - protein, 9 aa, Homo Sapiens
LANERLMTL

SEQ ID NO: 142209 - protein, 9 aa, Homo Sapiens
LANIRSPVF

SEQ ID NO: 142210 - protein, 9 aa, Homo Sapiens
LANLHITAL

SEQ ID NO: 142211 - protein, 9 aa, Homo Sapiens
LANPHELSL

SEQ ID NO: 142212 - protein, 9 aa, Homo Sapiens
LANPTTSAL

SEQ ID NO: 142213 - protein, 9 aa, Homo Sapiens
LAQAHIQQL

SEQ ID NO: 142214 - protein, 9 aa, Homo Sapiens
LAQAMETAL

SEQ ID NO: 142215 - protein, 9 aa, Homo Sapiens
LAQDIFKEL

SEQ ID NO: 142216 - protein, 9 aa, Homo Sapiens
LAQEIVKAL

SEQ ID NO: 142217 - protein, 9 aa, Homo Sapiens
LAQHTMLTL

SEQ ID NO: 142218 - protein, 9 aa, Homo Sapiens
LAQPQMMVV

SEQ ID NO: 142219 - protein, 9 aa, Homo Sapiens
LAQPTLLYL

SEQ ID NO: 142220 - protein, 9 aa, Homo Sapiens
LAQQAILSL

SEQ ID NO: 142221 - protein, 9 aa, Homo Sapiens
LAQVSGLEM

SEQ ID NO: 142222 - protein, 9 aa, Homo Sapiens
LASAIINTL

SEQ ID NO: 142223 - protein, 9 aa, Homo Sapiens
LASFKILAL

SEQ ID NO: 142224 - protein, 9 aa, Homo Sapiens
LASHILTAL

SEQ ID NO: 142225 - protein, 9 aa, Homo Sapiens
LASPESLEL

SEQ ID NO: 142226 - protein, 9 aa, Homo Sapiens
LASPPWRVL

SEQ ID NO: 142227 - protein, 9 aa, Homo Sapiens
LASPVFARL

SEQ ID NO: 142228 - protein, 9 aa, Homo Sapiens
LASPVSPEL

SEQ ID NO: 142229 - protein, 9 aa, Homo Sapiens
LASSEWPEL

SEQ ID NO: 142230 - protein, 9 aa, Homo Sapiens
LASVPSPAL

SEQ ID NO: 142231 - protein, 9 aa, Homo Sapiens
LATAAALTY

SEQ ID NO: 142232 - protein, 9 aa, Homo Sapiens
LATASSPKF

SEQ ID NO: 142233 - protein, 9 aa, Homo Sapiens
LATAVIPQW

SEQ ID NO: 142234 - protein, 9 aa, Homo Sapiens
LATDAVQIL

SEQ ID NO: 142235 - protein, 9 aa, Homo Sapiens
LATDFIQSL

SEQ ID NO: 142236 - protein, 9 aa, Homo Sapiens
LATGAAMVL

SEQ ID NO: 142237 - protein, 9 aa, Homo Sapiens
LATHPGISF

SEQ ID NO: 142238 - protein, 9 aa, Homo Sapiens
LATIHLPYL

SEQ ID NO: 142239 - protein, 9 aa, Homo Sapiens
LATLIHQVL

SEQ ID NO: 142240 - protein, 9 aa, Homo Sapiens
LATPPFSRL

SEQ ID NO: 142241 - protein, 9 aa, Homo Sapiens
LATPVDLKL

SEQ ID NO: 142242 - protein, 9 aa, Homo Sapiens
LATRAIPEL

SEQ ID NO: 142243 - protein, 9 aa, Homo Sapiens
LATRSFPQL

SEQ ID NO: 142244 - protein, 9 aa, Homo Sapiens
LATSHMLEL

SEQ ID NO: 142245 - protein, 9 aa, Homo Sapiens
LATWATKEL

SEQ ID NO: 142246 - protein, 9 aa, Homo Sapiens
LAVAGATSL

SEQ ID NO: 142247 - protein, 9 aa, Homo Sapiens
LAVDGLMEM

SEQ ID NO: 142248 - protein, 9 aa, Homo Sapiens
LAVDKSASL

SEQ ID NO: 142249 - protein, 9 aa, Homo Sapiens
LAVDTQLLL

SEQ ID NO: 142250 - protein, 9 aa, Homo Sapiens
LAVEAVLRL

SEQ ID NO: 142251 - protein, 9 aa, Homo Sapiens
LAVEKAAEL

SEQ ID NO: 142252 - protein, 9 aa, Homo Sapiens
LAVEPGSNL

SEQ ID NO: 142253 - protein, 9 aa, Homo Sapiens
LAVEYVDSL

SEQ ID NO: 142254 - protein, 9 aa, Homo Sapiens
LAVHIAHSL

SEQ ID NO: 142255 - protein, 9 aa, Homo Sapiens
LAVNLTRVL

SEQ ID NO: 142256 - protein, 9 aa, Homo Sapiens
LAVPDMSSL

SEQ ID NO: 142257 - protein, 9 aa, Homo Sapiens
LAVVVTKEM

SEQ ID NO: 142258 - protein, 9 aa, Homo Sapiens
LAYDTQLVL

SEQ ID NO: 142259 - protein, 9 aa, Homo Sapiens
LAYEPFSTL

SEQ ID NO: 142260 - protein, 9 aa, Homo Sapiens
LAYHLAVVL

SEQ ID NO: 142261 - protein, 9 aa, Homo Sapiens
LAYIAHPKL

SEQ ID NO: 142262 - protein, 9 aa, Homo Sapiens
LAYIHLIEF

SEQ ID NO: 142263 - protein, 9 aa, Homo Sapiens
LAYLQRIAL

SEQ ID NO: 142264 - protein, 9 aa, Homo Sapiens
LAYMNHIMV

SEQ ID NO: 142265 - protein, 9 aa, Homo Sapiens
LAYPGSATI

SEQ ID NO: 142266 - protein, 9 aa, Homo Sapiens
LAYTGFVKL

SEQ ID NO: 142267 - protein, 9 aa, Homo Sapiens
LCHPHIIRL

SEQ ID NO: 142268 - protein, 9 aa, Homo Sapiens
LFMPRSTEF

SEQ ID NO: 142269 - protein, 9 aa, Homo Sapiens
LGIPHSFAL

SEQ ID NO: 142270 - protein, 9 aa, Homo Sapiens
LGIPIITVL

SEQ ID NO: 142271 - protein, 9 aa, Homo Sapiens
LGIPISNIL

SEQ ID NO: 142272 - protein, 9 aa, Homo Sapiens
LGSPWAVEL

SEQ ID NO: 142273 - protein, 9 aa, Homo Sapiens
LGYTSGLSL

SEQ ID NO: 142274 - protein, 9 aa, Homo Sapiens
LIDVARTSL

SEQ ID NO: 142275 - protein, 9 aa, Homo Sapiens
LIMDAYNSL

SEQ ID NO: 142276 - protein, 9 aa, Homo Sapiens
LINANMMVL

SEQ ID NO: 142277 - protein, 9 aa, Homo Sapiens
LIVDRPVTL

SEQ ID NO: 142278 - protein, 9 aa, Homo Sapiens
LIVDSVKEL

SEQ ID NO: 142279 - protein, 9 aa, Homo Sapiens
LIVEPSREL

SEQ ID NO: 142280 - protein, 9 aa, Homo Sapiens
LIYDGKVEM

SEQ ID NO: 142281 - protein, 9 aa, Homo Sapiens
LIYEDSIVL

SEQ ID NO: 142282 - protein, 9 aa, Homo Sapiens
LIYGTPRAA

SEQ ID NO: 142283 - protein, 9 aa, Homo Sapiens
LKETRAFPI

SEQ ID NO: 142284 - protein, 9 aa, Homo Sapiens
LLAMPVMVL

SEQ ID NO: 142285 - protein, 9 aa, Homo Sapiens
LLAQPGEAL

SEQ ID NO: 142286 - protein, 9 aa, Homo Sapiens
LLLAHIIAL

SEQ ID NO: 142287 - protein, 9 aa, Homo Sapiens
LLLPAGIAL

SEQ ID NO: 142288 - protein, 9 aa, Homo Sapiens
LLPEHFLFL

SEQ ID NO: 142289 - protein, 9 aa, Homo Sapiens
LLSLPATPL

SEQ ID NO: 142290 - protein, 9 aa, Homo Sapiens
LLVDHFMEL

SEQ ID NO: 142291 - protein, 9 aa, Homo Sapiens
LMEAVAVLV

SEQ ID NO: 142292 - protein, 9 aa, Homo Sapiens
LMMDPLTGL

SEQ ID NO: 142293 - protein, 9 aa, Homo Sapiens
LNAAPRIAL

SEQ ID NO: 142294 - protein, 9 aa, Homo Sapiens
LPINGNGKQ

SEQ ID NO: 142295 - protein, 9 aa, Homo Sapiens
LSAPIHTQM

SEQ ID NO: 142296 - protein, 9 aa, Homo Sapiens
LSAPSLHAL

SEQ ID NO: 142297 - protein, 9 aa, Homo Sapiens
LSDDHVLIL

SEQ ID NO: 142298 - protein, 9 aa, Homo Sapiens
LSDPFYRTL

SEQ ID NO: 142299 - protein, 9 aa, Homo Sapiens
LSDPQVHTV

SEQ ID NO: 142300 - protein, 9 aa, Homo Sapiens
LSDPTYREL

SEQ ID NO: 142301 - protein, 9 aa, Homo Sapiens
LSEPMVHEL

SEQ ID NO: 142302 - protein, 9 aa, Homo Sapiens
LSFNPLTSL

SEQ ID NO: 142303 - protein, 9 aa, Homo Sapiens
LSFTHPTSF

SEQ ID NO: 142304 - protein, 9 aa, Homo Sapiens
LSFWWPLAL

SEQ ID NO: 142305 - protein, 9 aa, Homo Sapiens
LSHSLLVTL

SEQ ID NO: 142306 - protein, 9 aa, Homo Sapiens
LSIDLFHVL

SEQ ID NO: 142307 - protein, 9 aa, Homo Sapiens
LSIEQLTTL

SEQ ID NO: 142308 - protein, 9 aa, Homo Sapiens
LSIPSFQAL

SEQ ID NO: 142309 - protein, 9 aa, Homo Sapiens
LSKDSILSL

SEQ ID NO: 142310 - protein, 9 aa, Homo Sapiens
LSKGPGLEV

SEQ ID NO: 142311 - protein, 9 aa, Homo Sapiens
LSLPRASSL

SEQ ID NO: 142312 - protein, 9 aa, Homo Sapiens
LSMERMVPA

SEQ ID NO: 142313 - protein, 9 aa, Homo Sapiens
LSMVPITSL

SEQ ID NO: 142314 - protein, 9 aa, Homo Sapiens
LSNHVFNAL

SEQ ID NO: 142315 - protein, 9 aa, Homo Sapiens
LSQDPVLEL

SEQ ID NO: 142316 - protein, 9 aa, Homo Sapiens
LSQPILLEL

SEQ ID NO: 142317 - protein, 9 aa, Homo Sapiens
LSQPTPATL

SEQ ID NO: 142318 - protein, 9 aa, Homo Sapiens
LSQQPFLSL

SEQ ID NO: 142319 - protein, 9 aa, Homo Sapiens
LSQVPMSAL

SEQ ID NO: 142320 - protein, 9 aa, Homo Sapiens
LSQVRFLVL

SEQ ID NO: 142321 - protein, 9 aa, Homo Sapiens
LSSLPLNSL

SEQ ID NO: 142322 - protein, 9 aa, Homo Sapiens
LSSPPTESL

SEQ ID NO: 142323 - protein, 9 aa, Homo Sapiens
LSSPVAQML

SEQ ID NO: 142324 - protein, 9 aa, Homo Sapiens
LSSSVIREL

SEQ ID NO: 142325 - protein, 9 aa, Homo Sapiens
LSTPFGQAL

SEQ ID NO: 142326 - protein, 9 aa, Homo Sapiens
LSTPYIHSL

SEQ ID NO: 142327 - protein, 9 aa, Homo Sapiens
LSTTVQPNL

SEQ ID NO: 142328 - protein, 9 aa, Homo Sapiens
LSTVVSPVI

SEQ ID NO: 142329 - protein, 9 aa, Homo Sapiens
LSVAPQQSL

SEQ ID NO: 142330 - protein, 9 aa, Homo Sapiens
LSVEIVHEL

SEQ ID NO: 142331 - protein, 9 aa, Homo Sapiens
LSVGSPSVL

SEQ ID NO: 142332 - protein, 9 aa, Homo Sapiens
LSVISSPQL

SEQ ID NO: 142333 - protein, 9 aa, Homo Sapiens
LSVRPQTAL

SEQ ID NO: 142334 - protein, 9 aa, Homo Sapiens
LTAEHFAAL

SEQ ID NO: 142335 - protein, 9 aa, Homo Sapiens
LTDGHPLTL

SEQ ID NO: 142336 - protein, 9 aa, Homo Sapiens
LTDPDIHVL

SEQ ID NO: 142337 - protein, 9 aa, Homo Sapiens
LTFNPSSAL

SEQ ID NO: 142338 - protein, 9 aa, Homo Sapiens
LTFPPATAL

SEQ ID NO: 142339 - protein, 9 aa, Homo Sapiens
LTIEKISAL

SEQ ID NO: 142340 - protein, 9 aa, Homo Sapiens
LTIPASLDL

SEQ ID NO: 142341 - protein, 9 aa, Homo Sapiens
LTLKHVKAL

SEQ ID NO: 142342 - protein, 9 aa, Homo Sapiens
LTLRPGVSL

SEQ ID NO: 142343 - protein, 9 aa, Homo Sapiens
LTMLPRLVL

SEQ ID NO: 142344 - protein, 9 aa, Homo Sapiens
LTTDISLIF

SEQ ID NO: 142345 - protein, 9 aa, Homo Sapiens
LTTEVHPEL

SEQ ID NO: 142346 - protein, 9 aa, Homo Sapiens
LTVEPGASL

SEQ ID NO: 142347 - protein, 9 aa, Homo Sapiens
LTYMPSVSL

SEQ ID NO: 142348 - protein, 9 aa, Homo Sapiens
LVFPGFFEL

SEQ ID NO: 142349 - protein, 9 aa, Homo Sapiens
LVIGRVLEL

SEQ ID NO: 142350 - protein, 9 aa, Homo Sapiens
LVINIIHSL

SEQ ID NO: 142351 - protein, 9 aa, Homo Sapiens
LVISDGSSL

SEQ ID NO: 142352 - protein, 9 aa, Homo Sapiens
LVLVPTREL

SEQ ID NO: 142353 - protein, 9 aa, Homo Sapiens
LVNGKSLEL

SEQ ID NO: 142354 - protein, 9 aa, Homo Sapiens
LVNPEGPTL

SEQ ID NO: 142355 - protein, 9 aa, Homo Sapiens
LVPALTDDS

SEQ ID NO: 142356 - protein, 9 aa, Homo Sapiens
LVTDIQPVL

SEQ ID NO: 142357 - protein, 9 aa, Homo Sapiens
LVVDKAMEL

SEQ ID NO: 142358 - protein, 9 aa, Homo Sapiens
MAAAALTSL

SEQ ID NO: 142359 - protein, 9 aa, Homo Sapiens
MAAAMPLAL

SEQ ID NO: 142360 - protein, 9 aa, Homo Sapiens
MAAMVLTSL

SEQ ID NO: 142361 - protein, 9 aa, Homo Sapiens
MAANVIPVL

SEQ ID NO: 142362 - protein, 9 aa, Homo Sapiens
MADPNIRFL

SEQ ID NO: 142363 - protein, 9 aa, Homo Sapiens
MAEPFTKAL

SEQ ID NO: 142364 - protein, 9 aa, Homo Sapiens
MAEPNAKFI

SEQ ID NO: 142365 - protein, 9 aa, Homo Sapiens
MAFDPTSTL

SEQ ID NO: 142366 - protein, 9 aa, Homo Sapiens
MAGPLRAPL

SEQ ID NO: 142367 - protein, 9 aa, Homo Sapiens
MAIAPNVTV

SEQ ID NO: 142368 - protein, 9 aa, Homo Sapiens
MAINSISKL

SEQ ID NO: 142369 - protein, 9 aa, Homo Sapiens
MAISGVPVL

SEQ ID NO: 142370 - protein, 9 aa, Homo Sapiens
MAISKPRNL

SEQ ID NO: 142371 - protein, 9 aa, Homo Sapiens
MAIVGGMAL

SEQ ID NO: 142372 - protein, 9 aa, Homo Sapiens
MALGHVIVL

SEQ ID NO: 142373 - protein, 9 aa, Homo Sapiens
MALLFLLPL

SEQ ID NO: 142374 - protein, 9 aa, Homo Sapiens
MAMAYGSSL

SEQ ID NO: 142375 - protein, 9 aa, Homo Sapiens
MANGAVIHL

SEQ ID NO: 142376 - protein, 9 aa, Homo Sapiens
MANPQMQQL

SEQ ID NO: 142377 - protein, 9 aa, Homo Sapiens
MASGHFAFL

SEQ ID NO: 142378 - protein, 9 aa, Homo Sapiens
MASLGALAL

SEQ ID NO: 142379 - protein, 9 aa, Homo Sapiens
MATAEAQSL

SEQ ID NO: 142380 - protein, 9 aa, Homo Sapiens
MATESILHF

SEQ ID NO: 142381 - protein, 9 aa, Homo Sapiens
MAVGGGLAV

SEQ ID NO: 142382 - protein, 9 aa, Homo Sapiens
MAYFPAISL

SEQ ID NO: 142383 - protein, 9 aa, Homo Sapiens
MAYPSLVAM

SEQ ID NO: 142384 - protein, 9 aa, Homo Sapiens
MAYVSGLSF

SEQ ID NO: 142385 - protein, 9 aa, Homo Sapiens
MGMVAGTTM

SEQ ID NO: 142386 - protein, 9 aa, Homo Sapiens
MIIEDPAAL

SEQ ID NO: 142387 - protein, 9 aa, Homo Sapiens
MIIENFEAL

SEQ ID NO: 142388 - protein, 9 aa, Homo Sapiens
MILIPGQTL

SEQ ID NO: 142389 - protein, 9 aa, Homo Sapiens
MPMMPGPPM

SEQ ID NO: 142390 - protein, 9 aa, Homo Sapiens
MSDTTFKAL

SEQ ID NO: 142391 - protein, 9 aa, Homo Sapiens
MSSDVFPLL

SEQ ID NO: 142392 - protein, 9 aa, Homo Sapiens
MSSPLSKEL

SEQ ID NO: 142393 - protein, 9 aa, Homo Sapiens
MSVEVRQTL

SEQ ID NO: 142394 - protein, 9 aa, Homo Sapiens
MSVQPTVSL

SEQ ID NO: 142395 - protein, 9 aa, Homo Sapiens
MTIENMNHL

SEQ ID NO: 142396 - protein, 9 aa, Homo Sapiens
MTQQPRPVL

SEQ ID NO: 142397 - protein, 9 aa, Homo Sapiens
MVADKFTEL

SEQ ID NO: 142398 - protein, 9 aa, Homo Sapiens
MVIVPTREL

SEQ ID NO: 142399 - protein, 9 aa, Homo Sapiens
MVNPVIYAL

SEQ ID NO: 142400 - protein, 9 aa, Homo Sapiens
MVVDIVQEL

SEQ ID NO: 142401 - protein, 9 aa, Homo Sapiens
MVVGTGTSL

SEQ ID NO: 142402 - protein, 9 aa, Homo Sapiens
NAATSFQVL

SEQ ID NO: 142403 - protein, 9 aa, Homo Sapiens
NADPIAKYL

SEQ ID NO: 142404 - protein, 9 aa, Homo Sapiens
NADPNMKLF

SEQ ID NO: 142405 - protein, 9 aa, Homo Sapiens
NAFMKAVEL

SEQ ID NO: 142406 - protein, 9 aa, Homo Sapiens
NAFSGVMML

SEQ ID NO: 142407 - protein, 9 aa, Homo Sapiens
NAIGPLVAL

SEQ ID NO: 142408 - protein, 9 aa, Homo Sapiens
NAILVDTPL

SEQ ID NO: 142409 - protein, 9 aa, Homo Sapiens
NAINITSAL

SEQ ID NO: 142410 - protein, 9 aa, Homo Sapiens
NAIREVLEL

SEQ ID NO: 142411 - protein, 9 aa, Homo Sapiens
NAISIHHAL

SEQ ID NO: 142412 - protein, 9 aa, Homo Sapiens
NAITAFSTL

SEQ ID NO: 142413 - protein, 9 aa, Homo Sapiens
NALFHASTL

SEQ ID NO: 142414 - protein, 9 aa, Homo Sapiens
NAMGFHVIL

SEQ ID NO: 142415 - protein, 9 aa, Homo Sapiens
NASPVISSV

SEQ ID NO: 142416 - protein, 9 aa, Homo Sapiens
NAVGLFSRL

SEQ ID NO: 142417 - protein, 9 aa, Homo Sapiens
NAVPLFLRL

SEQ ID NO: 142418 - protein, 9 aa, Homo Sapiens
NAVWALSNL

SEQ ID NO: 142419 - protein, 9 aa, Homo Sapiens
NAYTGIVLL

SEQ ID NO: 142420 - protein, 9 aa, Homo Sapiens
NGIFPGTPL

SEQ ID NO: 142421 - protein, 9 aa, Homo Sapiens
NIDEAYKIL

SEQ ID NO: 142422 - protein, 9 aa, Homo Sapiens
NILDRFLAL

SEQ ID NO: 142423 - protein, 9 aa, Homo Sapiens
NIYAANPVI

SEQ ID NO: 142424 - protein, 9 aa, Homo Sapiens
NSNPVIAEL

SEQ ID NO: 142425 - protein, 9 aa, Homo Sapiens
NTIDPSHPM

SEQ ID NO: 142426 - protein, 9 aa, Homo Sapiens
NTIETFNEL

SEQ ID NO: 142427 - protein, 9 aa, Homo Sapiens
NTMGHMMEM

SEQ ID NO: 142428 - protein, 9 aa, Homo Sapiens
NVIESFTEL

SEQ ID NO: 142429 - protein, 9 aa, Homo Sapiens
NVLDHFSEL

SEQ ID NO: 142430 - protein, 9 aa, Homo Sapiens
QAADSILVL

SEQ ID NO: 142431 - protein, 9 aa, Homo Sapiens
QAFPGLLQL

SEQ ID NO: 142432 - protein, 9 aa, Homo Sapiens
QAFPRITQL

SEQ ID NO: 142433 - protein, 9 aa, Homo Sapiens
QAHLTLMAL

SEQ ID NO: 142434 - protein, 9 aa, Homo Sapiens
QAIENAHVL

SEQ ID NO: 142435 - protein, 9 aa, Homo Sapiens
QAIERYLVV

SEQ ID NO: 142436 - protein, 9 aa, Homo Sapiens
QAIGAIRTL

SEQ ID NO: 142437 - protein, 9 aa, Homo Sapiens
QAIPVTSEL

SEQ ID NO: 142438 - protein, 9 aa, Homo Sapiens
QALDYFLKM

SEQ ID NO: 142439 - protein, 9 aa, Homo Sapiens
QALPWISIL

SEQ ID NO: 142440 - protein, 9 aa, Homo Sapiens
QAMGSFLSV

SEQ ID NO: 142441 - protein, 9 aa, Homo Sapiens
QAMPPLFSL

SEQ ID NO: 142442 - protein, 9 aa, Homo Sapiens
QAMPTLIEL

SEQ ID NO: 142443 - protein, 9 aa, Homo Sapiens
QANIRLTSL

SEQ ID NO: 142444 - protein, 9 aa, Homo Sapiens
QATDSILVF

SEQ ID NO: 142445 - protein, 9 aa, Homo Sapiens
QATMPHLSM

SEQ ID NO: 142446 - protein, 9 aa, Homo Sapiens
QATPAALVL

SEQ ID NO: 142447 - protein, 9 aa, Homo Sapiens
QAVKIGQSL

SEQ ID NO: 142448 - protein, 9 aa, Homo Sapiens
QIIAFFAHL

SEQ ID NO: 142449 - protein, 9 aa, Homo Sapiens
QLLDIKIRL

SEQ ID NO: 142450 - protein, 9 aa, Homo Sapiens
QSISPGSRL

SEQ ID NO: 142451 - protein, 9 aa, Homo Sapiens
QSLPPGLAV

SEQ ID NO: 142452 - protein, 9 aa, Homo Sapiens
QSYGNVVEL

SEQ ID NO: 142453 - protein, 9 aa, Homo Sapiens
QVEDAFRYM

SEQ ID NO: 142454 - protein, 9 aa, Homo Sapiens
RAFQPSVSL

SEQ ID NO: 142455 - protein, 9 aa, Homo Sapiens
RAHSEPLAL

SEQ ID NO: 142456 - protein, 9 aa, Homo Sapiens
RAIDFSPYL

SEQ ID NO: 142457 - protein, 9 aa, Homo Sapiens
RAIEIYTDM

SEQ ID NO: 142458 - protein, 9 aa, Homo Sapiens
RAIELATTL

SEQ ID NO: 142459 - protein, 9 aa, Homo Sapiens
RAIGIGAYL

SEQ ID NO: 142460 - protein, 9 aa, Homo Sapiens
RAIPNNQVL

SEQ ID NO: 142461 - protein, 9 aa, Homo Sapiens
RAIQFYLEF

SEQ ID NO: 142462 - protein, 9 aa, Homo Sapiens
RALDHYLTL

SEQ ID NO: 142463 - protein, 9 aa, Homo Sapiens
RALEHFTDL

SEQ ID NO: 142464 - protein, 9 aa, Homo Sapiens
RATPHFSGL

SEQ ID NO: 142465 - protein, 9 aa, Homo Sapiens
RAVAPTMSL

SEQ ID NO: 142466 - protein, 9 aa, Homo Sapiens
RAVPVGSGL

SEQ ID NO: 142467 - protein, 9 aa, Homo Sapiens
RAYAKFYTL

SEQ ID NO: 142468 - protein, 9 aa, Homo Sapiens
RCIPALDSL

SEQ ID NO: 142469 - protein, 9 aa, Homo Sapiens
RIFEKMFAM

SEQ ID NO: 142470 - protein, 9 aa, Homo Sapiens
RIIPRHLQL

SEQ ID NO: 142471 - protein, 9 aa, Homo Sapiens
RIPSFVTEL

SEQ ID NO: 142472 - protein, 9 aa, Homo Sapiens
RIVPRFSEL

SEQ ID NO: 142473 - protein, 9 aa, Homo Sapiens
RLLDWFRSL

SEQ ID NO: 142474 - protein, 9 aa, Homo Sapiens
RSIFPQQSL

SEQ ID NO: 142475 - protein, 9 aa, Homo Sapiens
RTFEAFMYL

SEQ ID NO: 142476 - protein, 9 aa, Homo Sapiens
RTIGFFYTL

SEQ ID NO: 142477 - protein, 9 aa, Homo Sapiens
RTMEIFQLL

SEQ ID NO: 142478 - protein, 9 aa, Homo Sapiens
RTNRPPLSL

SEQ ID NO: 142479 - protein, 9 aa, Homo Sapiens
RTVDLFPVL

SEQ ID NO: 142480 - protein, 9 aa, Homo Sapiens
RVIDVGSEW

SEQ ID NO: 142481 - protein, 9 aa, Homo Sapiens
RVIDYILDL

SEQ ID NO: 142482 - protein, 9 aa, Homo Sapiens
SAACPGLQL

SEQ ID NO: 142483 - protein, 9 aa, Homo Sapiens
SAAEAYQVL

SEQ ID NO: 142484 - protein, 9 aa, Homo Sapiens
SAAEIMAVL

SEQ ID NO: 142485 - protein, 9 aa, Homo Sapiens
SAAENFLVL

SEQ ID NO: 142486 - protein, 9 aa, Homo Sapiens
SAAFPGASL

SEQ ID NO: 142487 - protein, 9 aa, Homo Sapiens
SAAGPGFSL

SEQ ID NO: 142488 - protein, 9 aa, Homo Sapiens
SAAMPGASL

SEQ ID NO: 142489 - protein, 9 aa, Homo Sapiens
SAAMVFSAL

SEQ ID NO: 142490 - protein, 9 aa, Homo Sapiens
SAANIQPIF

SEQ ID NO: 142491 - protein, 9 aa, Homo Sapiens
SAAPEGVPL

SEQ ID NO: 142492 - protein, 9 aa, Homo Sapiens
SAAPLFFSW

SEQ ID NO: 142493 - protein, 9 aa, Homo Sapiens
SAAPLGTTL

SEQ ID NO: 142494 - protein, 9 aa, Homo Sapiens
SAAPLQPVL

SEQ ID NO: 142495 - protein, 9 aa, Homo Sapiens
SAAPRTVAL

SEQ ID NO: 142496 - protein, 9 aa, Homo Sapiens
SAAPTFLLL

SEQ ID NO: 142497 - protein, 9 aa, Homo Sapiens
SAAQPGVAF

SEQ ID NO: 142498 - protein, 9 aa, Homo Sapiens
SAASITPLL

SEQ ID NO: 142499 - protein, 9 aa, Homo Sapiens
SAASLYPVL

SEQ ID NO: 142500 - protein, 9 aa, Homo Sapiens
SADFPRVGM

SEQ ID NO: 142501 - protein, 9 aa, Homo Sapiens
SADPGILVL

SEQ ID NO: 142502 - protein, 9 aa, Homo Sapiens
SADSLEHVL

SEQ ID NO: 142503 - protein, 9 aa, Homo Sapiens
SAFDHFASV

SEQ ID NO: 142504 - protein, 9 aa, Homo Sapiens
SAFGYFITA

SEQ ID NO: 142505 - protein, 9 aa, Homo Sapiens
SAFLKTIAL

SEQ ID NO: 142506 - protein, 9 aa, Homo Sapiens
SAFPEVRSL

SEQ ID NO: 142507 - protein, 9 aa, Homo Sapiens
SAFPFPVTV

SEQ ID NO: 142508 - protein, 9 aa, Homo Sapiens
SAFPHLRVL

SEQ ID NO: 142509 - protein, 9 aa, Homo Sapiens
SAHSHFISL

SEQ ID NO: 142510 - protein, 9 aa, Homo Sapiens
SAIASTKVM

SEQ ID NO: 142511 - protein, 9 aa, Homo Sapiens
SAIDRIFTL

SEQ ID NO: 142512 - protein, 9 aa, Homo Sapiens
SAIEIYLKL

SEQ ID NO: 142513 - protein, 9 aa, Homo Sapiens
SAIFNFQSL

SEQ ID NO: 142514 - protein, 9 aa, Homo Sapiens
SAIFPDVAL

SEQ ID NO: 142515 - protein, 9 aa, Homo Sapiens
SAIGPFSGL

SEQ ID NO: 142516 - protein, 9 aa, Homo Sapiens
SAIGYIHSL

SEQ ID NO: 142517 - protein, 9 aa, Homo Sapiens
SAIHVLASL

SEQ ID NO: 142518 - protein, 9 aa, Homo Sapiens
SAIIFETPL

SEQ ID NO: 142519 - protein, 9 aa, Homo Sapiens
SAILRSPAF

SEQ ID NO: 142520 - protein, 9 aa, Homo Sapiens
SAINQVEAL

SEQ ID NO: 142521 - protein, 9 aa, Homo Sapiens
SAIPHPLIM

SEQ ID NO: 142522 - protein, 9 aa, Homo Sapiens
SAIPWGISA

SEQ ID NO: 142523 - protein, 9 aa, Homo Sapiens
SAITTLMHL

SEQ ID NO: 142524 - protein, 9 aa, Homo Sapiens
SALAKLSVL

SEQ ID NO: 142525 - protein, 9 aa, Homo Sapiens
SALAWQQSL

SEQ ID NO: 142526 - protein, 9 aa, Homo Sapiens
SALDTGFSL

SEQ ID NO: 142527 - protein, 9 aa, Homo Sapiens
SALEKFVEL

SEQ ID NO: 142528 - protein, 9 aa, Homo Sapiens
SALEKSLAV

SEQ ID NO: 142529 - protein, 9 aa, Homo Sapiens
SALERLTTL

SEQ ID NO: 142530 - protein, 9 aa, Homo Sapiens
SALGHLSFL

SEQ ID NO: 142531 - protein, 9 aa, Homo Sapiens
SALGKSPWL

SEQ ID NO: 142532 - protein, 9 aa, Homo Sapiens
SALHYAVEL

SEQ ID NO: 142533 - protein, 9 aa, Homo Sapiens
SALNRMKEL

SEQ ID NO: 142534 - protein, 9 aa, Homo Sapiens
SALNVRLFL

SEQ ID NO: 142535 - protein, 9 aa, Homo Sapiens
SALPFITYL

SEQ ID NO: 142536 - protein, 9 aa, Homo Sapiens
SAMAVVSRL

SEQ ID NO: 142537 - protein, 9 aa, Homo Sapiens
SAMEVVPAL

SEQ ID NO: 142538 - protein, 9 aa, Homo Sapiens
SAMKAVTEL

SEQ ID NO: 142539 - protein, 9 aa, Homo Sapiens
SAMMYIQEL

SEQ ID NO: 142540 - protein, 9 aa, Homo Sapiens
SAQGKPLAL

SEQ ID NO: 142541 - protein, 9 aa, Homo Sapiens
SAQPWIAAL

SEQ ID NO: 142542 - protein, 9 aa, Homo Sapiens
SASALAVAL

SEQ ID NO: 142543 - protein, 9 aa, Homo Sapiens
SASPASLLL

SEQ ID NO: 142544 - protein, 9 aa, Homo Sapiens
SASSFFKEL

SEQ ID NO: 142545 - protein, 9 aa, Homo Sapiens
SASTVFIAL

SEQ ID NO: 142546 - protein, 9 aa, Homo Sapiens
SATELMNIL

SEQ ID NO: 142547 - protein, 9 aa, Homo Sapiens
SATIVIAYL

SEQ ID NO: 142548 - protein, 9 aa, Homo Sapiens
SATQVFPRL

SEQ ID NO: 142549 - protein, 9 aa, Homo Sapiens
SATQVYTIL

SEQ ID NO: 142550 - protein, 9 aa, Homo Sapiens
SATRVYIVL

SEQ ID NO: 142551 - protein, 9 aa, Homo Sapiens
SAVDFIRTL

SEQ ID NO: 142552 - protein, 9 aa, Homo Sapiens
SAVDLPVTL

SEQ ID NO: 142553 - protein, 9 aa, Homo Sapiens
SAVDPVAVL

SEQ ID NO: 142554 - protein, 9 aa, Homo Sapiens
SAVDVHINM

SEQ ID NO: 142555 - protein, 9 aa, Homo Sapiens
SAVGHVFSL

SEQ ID NO: 142556 - protein, 9 aa, Homo Sapiens
SAVGKTSLL

SEQ ID NO: 142557 - protein, 9 aa, Homo Sapiens
SAVGQFVSL

SEQ ID NO: 142558 - protein, 9 aa, Homo Sapiens
SAVSHFFSL

SEQ ID NO: 142559 - protein, 9 aa, Homo Sapiens
SAVSIFHEL

SEQ ID NO: 142560 - protein, 9 aa, Homo Sapiens
SAVSSFVFL

SEQ ID NO: 142561 - protein, 9 aa, Homo Sapiens
SAVTTFEAL

SEQ ID NO: 142562 - protein, 9 aa, Homo Sapiens
SAVVQHMSL

SEQ ID NO: 142563 - protein, 9 aa, Homo Sapiens
SAVWNSPPL

SEQ ID NO: 142564 - protein, 9 aa, Homo Sapiens
SAVYVLSSM

SEQ ID NO: 142565 - protein, 9 aa, Homo Sapiens
SAYAGFLAL

SEQ ID NO: 142566 - protein, 9 aa, Homo Sapiens
SAYGKFRKL

SEQ ID NO: 142567 - protein, 9 aa, Homo Sapiens
SAYPLSVEW

SEQ ID NO: 142568 - protein, 9 aa, Homo Sapiens
SAYQNHLIL

SEQ ID NO: 142569 - protein, 9 aa, Homo Sapiens
SCYGYPIQL

SEQ ID NO: 142570 - protein, 9 aa, Homo Sapiens
SDLWPFEAI

SEQ ID NO: 142571 - protein, 9 aa, Homo Sapiens
SFLTQSYQL

SEQ ID NO: 142572 - protein, 9 aa, Homo Sapiens
SFVDLRLLL

SEQ ID NO: 142573 - protein, 9 aa, Homo Sapiens
SGIERMGPL

SEQ ID NO: 142574 - protein, 9 aa, Homo Sapiens
SGIGFGESL

SEQ ID NO: 142575 - protein, 9 aa, Homo Sapiens
SGIGVSQVL

SEQ ID NO: 142576 - protein, 9 aa, Homo Sapiens
SIAGIFKEV

SEQ ID NO: 142577 - protein, 9 aa, Homo Sapiens
SIFSGAASL

SEQ ID NO: 142578 - protein, 9 aa, Homo Sapiens
SIIAMGNTL

SEQ ID NO: 142579 - protein, 9 aa, Homo Sapiens
SIIGRLLEV

SEQ ID NO: 142580 - protein, 9 aa, Homo Sapiens
SIIGSARSL

SEQ ID NO: 142581 - protein, 9 aa, Homo Sapiens
SIILPQTEL

SEQ ID NO: 142582 - protein, 9 aa, Homo Sapiens
SILSHFQSL

SEQ ID NO: 142583 - protein, 9 aa, Homo Sapiens
SISGITMVL

SEQ ID NO: 142584 - protein, 9 aa, Homo Sapiens
SIVAPGGAL

SEQ ID NO: 142585 - protein, 9 aa, Homo Sapiens
SIVEQQLPL

SEQ ID NO: 142586 - protein, 9 aa, Homo Sapiens
SIVKPYLTL

SEQ ID NO: 142587 - protein, 9 aa, Homo Sapiens
SIYSRFVQL

SEQ ID NO: 142588 - protein, 9 aa, Homo Sapiens
SLINPSSSL

SEQ ID NO: 142589 - protein, 9 aa, Homo Sapiens
SNVYPSKPL

SEQ ID NO: 142590 - protein, 9 aa, Homo Sapiens
SQYPFPVTL

SEQ ID NO: 142591 - protein, 9 aa, Homo Sapiens
SSAPPLSEL

SEQ ID NO: 142592 - protein, 9 aa, Homo Sapiens
SSIDPGLSI

SEQ ID NO: 142593 - protein, 9 aa, Homo Sapiens
SSMLPVMAL

SEQ ID NO: 142594 - protein, 9 aa, Homo Sapiens
SSMYPPHPL

SEQ ID NO: 142595 - protein, 9 aa, Homo Sapiens
SSSAVFLII

SEQ ID NO: 142596 - protein, 9 aa, Homo Sapiens
SSSPAVLAL

SEQ ID NO: 142597 - protein, 9 aa, Homo Sapiens
SSSPVSVVL

SEQ ID NO: 142598 - protein, 9 aa, Homo Sapiens
SSTPIAPVF

SEQ ID NO: 142599 - protein, 9 aa, Homo Sapiens
SSTTVIPTL

SEQ ID NO: 142600 - protein, 9 aa, Homo Sapiens
SSVGALHAL

SEQ ID NO: 142601 - protein, 9 aa, Homo Sapiens
SSVGKVSVL

SEQ ID NO: 142602 - protein, 9 aa, Homo Sapiens
SSVHVIMYL

SEQ ID NO: 142603 - protein, 9 aa, Homo Sapiens
SSVMPGMMM

SEQ ID NO: 142604 - protein, 9 aa, Homo Sapiens
SSVPGVRLL

SEQ ID NO: 142605 - protein, 9 aa, Homo Sapiens
STDENFRYL

SEQ ID NO: 142606 - protein, 9 aa, Homo Sapiens
STFSPSLAL

SEQ ID NO: 142607 - protein, 9 aa, Homo Sapiens
STIDKVSVL

SEQ ID NO: 142608 - protein, 9 aa, Homo Sapiens
STIGIHPVC

SEQ ID NO: 142609 - protein, 9 aa, Homo Sapiens
STLNRFSAL

SEQ ID NO: 142610 - protein, 9 aa, Homo Sapiens
STLPALTAL

SEQ ID NO: 142611 - protein, 9 aa, Homo Sapiens
STPDHSFSL

SEQ ID NO: 142612 - protein, 9 aa, Homo Sapiens
SVAKESIPL

SEQ ID NO: 142613 - protein, 9 aa, Homo Sapiens
SVIEISRAL

SEQ ID NO: 142614 - protein, 9 aa, Homo Sapiens
SVIIPGMTL

SEQ ID NO: 142615 - protein, 9 aa, Homo Sapiens
SVIPPRTEL

SEQ ID NO: 142616 - protein, 9 aa, Homo Sapiens
SVISVVSYL

SEQ ID NO: 142617 - protein, 9 aa, Homo Sapiens
SVLDRPRAL

SEQ ID NO: 142618 - protein, 9 aa, Homo Sapiens
SVNGFISTL

SEQ ID NO: 142619 - protein, 9 aa, Homo Sapiens
SVVAVPLPL

SEQ ID NO: 142620 - protein, 9 aa, Homo Sapiens
SVVDVFAQL

SEQ ID NO: 142621 - protein, 9 aa, Homo Sapiens
SVVFHSTVI

SEQ ID NO: 142622 - protein, 9 aa, Homo Sapiens
TAAFPFAAL

SEQ ID NO: 142623 - protein, 9 aa, Homo Sapiens
TAAPTIGVL

SEQ ID NO: 142624 - protein, 9 aa, Homo Sapiens
TAAPVPTTL

SEQ ID NO: 142625 - protein, 9 aa, Homo Sapiens
TAAPVVPEL

SEQ ID NO: 142626 - protein, 9 aa, Homo Sapiens
TAASPTIAL

SEQ ID NO: 142627 - protein, 9 aa, Homo Sapiens
TAFHSSMAL

SEQ ID NO: 142628 - protein, 9 aa, Homo Sapiens
TAFPQRTEL

SEQ ID NO: 142629 - protein, 9 aa, Homo Sapiens
TAIAESPVI

SEQ ID NO: 142630 - protein, 9 aa, Homo Sapiens
TAIDWFHEW

SEQ ID NO: 142631 - protein, 9 aa, Homo Sapiens
TAIESTPTL

SEQ ID NO: 142632 - protein, 9 aa, Homo Sapiens
TAIIPNSQL

SEQ ID NO: 142633 - protein, 9 aa, Homo Sapiens
TAINHFFIW

SEQ ID NO: 142634 - protein, 9 aa, Homo Sapiens
TAIPISMVL

SEQ ID NO: 142635 - protein, 9 aa, Homo Sapiens
TAIPVTQEL

SEQ ID NO: 142636 - protein, 9 aa, Homo Sapiens
TAIRSGLEL

SEQ ID NO: 142637 - protein, 9 aa, Homo Sapiens
TAISFAPYL

SEQ ID NO: 142638 - protein, 9 aa, Homo Sapiens
TAISLFYEL

SEQ ID NO: 142639 - protein, 9 aa, Homo Sapiens
TAISRYMEL

SEQ ID NO: 142640 - protein, 9 aa, Homo Sapiens
TALGTFLFL

SEQ ID NO: 142641 - protein, 9 aa, Homo Sapiens
TALNLFFKL

SEQ ID NO: 142642 - protein, 9 aa, Homo Sapiens
TALPRIFSL

SEQ ID NO: 142643 - protein, 9 aa, Homo Sapiens
TALPSFTSL

SEQ ID NO: 142644 - protein, 9 aa, Homo Sapiens
TALSFFHML

SEQ ID NO: 142645 - protein, 9 aa, Homo Sapiens
TANKIFMVL

SEQ ID NO: 142646 - protein, 9 aa, Homo Sapiens
TASPFFRAL

SEQ ID NO: 142647 - protein, 9 aa, Homo Sapiens
TASPVAVSL

SEQ ID NO: 142648 - protein, 9 aa, Homo Sapiens
TASPVIKAV

SEQ ID NO: 142649 - protein, 9 aa, Homo Sapiens
TATFAISIL

SEQ ID NO: 142650 - protein, 9 aa, Homo Sapiens
TATPRDLVL

SEQ ID NO: 142651 - protein, 9 aa, Homo Sapiens
TAVAPNVAL

SEQ ID NO: 142652 - protein, 9 aa, Homo Sapiens
TAVENMPSL

SEQ ID NO: 142653 - protein, 9 aa, Homo Sapiens
TAVMPKVSL

SEQ ID NO: 142654 - protein, 9 aa, Homo Sapiens
TAVPTIFSL

SEQ ID NO: 142655 - protein, 9 aa, Homo Sapiens
TAVPYFSNL

SEQ ID NO: 142656 - protein, 9 aa, Homo Sapiens
TAYDNFVEL

SEQ ID NO: 142657 - protein, 9 aa, Homo Sapiens
TGIPGLEQL

SEQ ID NO: 142658 - protein, 9 aa, Homo Sapiens
TGIPVHLEL

SEQ ID NO: 142659 - protein, 9 aa, Homo Sapiens
TIDPIPHQL

SEQ ID NO: 142660 - protein, 9 aa, Homo Sapiens
TIDPNTRTL

SEQ ID NO: 142661 - protein, 9 aa, Homo Sapiens
TIIDKSKSV

SEQ ID NO: 142662 - protein, 9 aa, Homo Sapiens
TIIEATHVL

SEQ ID NO: 142663 - protein, 9 aa, Homo Sapiens
TIIPKVLAM

SEQ ID NO: 142664 - protein, 9 aa, Homo Sapiens
TIIRQNQAL

SEQ ID NO: 142665 - protein, 9 aa, Homo Sapiens
TIMPRGPTL

SEQ ID NO: 142666 - protein, 9 aa, Homo Sapiens
TITDIISAL

SEQ ID NO: 142667 - protein, 9 aa, Homo Sapiens
TIVDTGIGM

SEQ ID NO: 142668 - protein, 9 aa, Homo Sapiens
TIYDRFVHL

SEQ ID NO: 142669 - protein, 9 aa, Homo Sapiens
TIYHMFIAL

SEQ ID NO: 142670 - protein, 9 aa, Homo Sapiens
TSSPSILTL

SEQ ID NO: 142671 - protein, 9 aa, Homo Sapiens
TSVPVSAVF

SEQ ID NO: 142672 - protein, 9 aa, Homo Sapiens
TTIKPGLAL

SEQ ID NO: 142673 - protein, 9 aa, Homo Sapiens
TTMVPTAAL

SEQ ID NO: 142674 - protein, 9 aa, Homo Sapiens
TVIGAFWHL

SEQ ID NO: 142675 - protein, 9 aa, Homo Sapiens
TVIPHLMAL

SEQ ID NO: 142676 - protein, 9 aa, Homo Sapiens
TVYLRDIAL

SEQ ID NO: 142677 - protein, 9 aa, Homo Sapiens
TVYVSMIAL

SEQ ID NO: 142678 - protein, 9 aa, Homo Sapiens
VAAKKNVSI

SEQ ID NO: 142679 - protein, 9 aa, Homo Sapiens
VAAPASLSL

SEQ ID NO: 142680 - protein, 9 aa, Homo Sapiens
VAAPLGPLL

SEQ ID NO: 142681 - protein, 9 aa, Homo Sapiens
VADAIRTSL

SEQ ID NO: 142682 - protein, 9 aa, Homo Sapiens
VADPVYRTF

SEQ ID NO: 142683 - protein, 9 aa, Homo Sapiens
VADPYVVIM

SEQ ID NO: 142684 - protein, 9 aa, Homo Sapiens
VADTVYRAL

SEQ ID NO: 142685 - protein, 9 aa, Homo Sapiens
VADVRLYSL

SEQ ID NO: 142686 - protein, 9 aa, Homo Sapiens
VAFDKFWNM

SEQ ID NO: 142687 - protein, 9 aa, Homo Sapiens
VAFGPAFAL

SEQ ID NO: 142688 - protein, 9 aa, Homo Sapiens
VAFPSPAEL

SEQ ID NO: 142689 - protein, 9 aa, Homo Sapiens
VAFQHFQEL

SEQ ID NO: 142690 - protein, 9 aa, Homo Sapiens
VAFSPVTEL

SEQ ID NO: 142691 - protein, 9 aa, Homo Sapiens
VAFVGGIDL

SEQ ID NO: 142692 - protein, 9 aa, Homo Sapiens
VAIFAVDSL

SEQ ID NO: 142693 - protein, 9 aa, Homo Sapiens
VAIFPSPMM

SEQ ID NO: 142694 - protein, 9 aa, Homo Sapiens
VAIIARTDL

SEQ ID NO: 142695 - protein, 9 aa, Homo Sapiens
VAIKAGTTL

SEQ ID NO: 142696 - protein, 9 aa, Homo Sapiens
VAILRHPTL

SEQ ID NO: 142697 - protein, 9 aa, Homo Sapiens
VAIQAVLSL

SEQ ID NO: 142698 - protein, 9 aa, Homo Sapiens
VALDFEQEM

SEQ ID NO: 142699 - protein, 9 aa, Homo Sapiens
VALGNMYEL

SEQ ID NO: 142700 - protein, 9 aa, Homo Sapiens
VALLRVTPF

SEQ ID NO: 142701 - protein, 9 aa, Homo Sapiens
VALNAHTFL

SEQ ID NO: 142702 - protein, 9 aa, Homo Sapiens
VALPASGWL

SEQ ID NO: 142703 - protein, 9 aa, Homo Sapiens
VALPMVLVL

SEQ ID NO: 142704 - protein, 9 aa, Homo Sapiens
VALPPGLAV

SEQ ID NO: 142705 - protein, 9 aa, Homo Sapiens
VALPVVYSL

SEQ ID NO: 142706 - protein, 9 aa, Homo Sapiens
VALPVYLLI

SEQ ID NO: 142707 - protein, 9 aa, Homo Sapiens
VALVVGHEL

SEQ ID NO: 142708 - protein, 9 aa, Homo Sapiens
VAMTGEITL

SEQ ID NO: 142709 - protein, 9 aa, Homo Sapiens
VAMYGGLVL

SEQ ID NO: 142710 - protein, 9 aa, Homo Sapiens
VANGKLMIL

SEQ ID NO: 142711 - protein, 9 aa, Homo Sapiens
VANPEHMEM

SEQ ID NO: 142712 - protein, 9 aa, Homo Sapiens
VANPNSAIF

SEQ ID NO: 142713 - protein, 9 aa, Homo Sapiens
VANPVPASL

SEQ ID NO: 142714 - protein, 9 aa, Homo Sapiens
VANVSLLAL

SEQ ID NO: 142715 - protein, 9 aa, Homo Sapiens
VAQELPTTL

SEQ ID NO: 142716 - protein, 9 aa, Homo Sapiens
VAQFKFTVL

SEQ ID NO: 142717 - protein, 9 aa, Homo Sapiens
VAQGGWRSL

SEQ ID NO: 142718 - protein, 9 aa, Homo Sapiens
VAQTWFRFL

SEQ ID NO: 142719 - protein, 9 aa, Homo Sapiens
VASEIMAVL

SEQ ID NO: 142720 - protein, 9 aa, Homo Sapiens
VASEYPVIL

SEQ ID NO: 142721 - protein, 9 aa, Homo Sapiens
VASFPRTVL

SEQ ID NO: 142722 - protein, 9 aa, Homo Sapiens
VATAADLEL

SEQ ID NO: 142723 - protein, 9 aa, Homo Sapiens
VATAMARVL

SEQ ID NO: 142724 - protein, 9 aa, Homo Sapiens
VATDFFTVL

SEQ ID NO: 142725 - protein, 9 aa, Homo Sapiens
VATGVISTL

SEQ ID NO: 142726 - protein, 9 aa, Homo Sapiens
VATKIFQEL

SEQ ID NO: 142727 - protein, 9 aa, Homo Sapiens
VATLYGLSL

SEQ ID NO: 142728 - protein, 9 aa, Homo Sapiens
VATQVGIEW

SEQ ID NO: 142729 - protein, 9 aa, Homo Sapiens
VAVDGINAL

SEQ ID NO: 142730 - protein, 9 aa, Homo Sapiens
VAVDVNNML

SEQ ID NO: 142731 - protein, 9 aa, Homo Sapiens
VAVGSGLSW

SEQ ID NO: 142732 - protein, 9 aa, Homo Sapiens
VAVGVIKAV

SEQ ID NO: 142733 - protein, 9 aa, Homo Sapiens
VAVHVFSEF

SEQ ID NO: 142734 - protein, 9 aa, Homo Sapiens
VAVISGEAL

SEQ ID NO: 142735 - protein, 9 aa, Homo Sapiens
VAVMTVREL

SEQ ID NO: 142736 - protein, 9 aa, Homo Sapiens
VAVNKPAEF

SEQ ID NO: 142737 - protein, 9 aa, Homo Sapiens
VAVPGGVDL

SEQ ID NO: 142738 - protein, 9 aa, Homo Sapiens
VAVPTLNAL

SEQ ID NO: 142739 - protein, 9 aa, Homo Sapiens
VAVPVAVTF

SEQ ID NO: 142740 - protein, 9 aa, Homo Sapiens
VAVQHFSLL

SEQ ID NO: 142741 - protein, 9 aa, Homo Sapiens
VAVSPSLDL

SEQ ID NO: 142742 - protein, 9 aa, Homo Sapiens
VAYDNAVNL

SEQ ID NO: 142743 - protein, 9 aa, Homo Sapiens
VAYFGLTTL

SEQ ID NO: 142744 - protein, 9 aa, Homo Sapiens
VAYGKGTYF

SEQ ID NO: 142745 - protein, 9 aa, Homo Sapiens
VAYLQAHAL

SEQ ID NO: 142746 - protein, 9 aa, Homo Sapiens
VAYMNPIAM

SEQ ID NO: 142747 - protein, 9 aa, Homo Sapiens
VAYPGIPKL

SEQ ID NO: 142748 - protein, 9 aa, Homo Sapiens
VAYVSSVAL

SEQ ID NO: 142749 - protein, 9 aa, Homo Sapiens
VAYWRQAGL

SEQ ID NO: 142750 - protein, 9 aa, Homo Sapiens
VCNPIITKL

SEQ ID NO: 142751 - protein, 9 aa, Homo Sapiens
VGAEPLLPW

SEQ ID NO: 142752 - protein, 9 aa, Homo Sapiens
VGAPVGIAL

SEQ ID NO: 142753 - protein, 9 aa, Homo Sapiens
VGDPSVHLL

SEQ ID NO: 142754 - protein, 9 aa, Homo Sapiens
VGIKPSLEL

SEQ ID NO: 142755 - protein, 9 aa, Homo Sapiens
VGVPVGSAL

SEQ ID NO: 142756 - protein, 9 aa, Homo Sapiens
VIAPNPAQL

SEQ ID NO: 142757 - protein, 9 aa, Homo Sapiens
VIIEKTYSL

SEQ ID NO: 142758 - protein, 9 aa, Homo Sapiens
VIIGKTVTL

SEQ ID NO: 142759 - protein, 9 aa, Homo Sapiens
VIIGSTHVL

SEQ ID NO: 142760 - protein, 9 aa, Homo Sapiens
VIIPRYLTL

SEQ ID NO: 142761 - protein, 9 aa, Homo Sapiens
VIIWARLAL

SEQ ID NO: 142762 - protein, 9 aa, Homo Sapiens
VILEPMQEL

SEQ ID NO: 142763 - protein, 9 aa, Homo Sapiens
VIMGLSPIL

SEQ ID NO: 142764 - protein, 9 aa, Homo Sapiens
VIMPHNMYL

SEQ ID NO: 142765 - protein, 9 aa, Homo Sapiens
VINDWFKVL

SEQ ID NO: 142766 - protein, 9 aa, Homo Sapiens
VIVTPLTEL

SEQ ID NO: 142767 - protein, 9 aa, Homo Sapiens
VIYPARISL

SEQ ID NO: 142768 - protein, 9 aa, Homo Sapiens
VNNPHFLIM

SEQ ID NO: 142769 - protein, 9 aa, Homo Sapiens
VSDFGGRSL

SEQ ID NO: 142770 - protein, 9 aa, Homo Sapiens
VSFPYVIAL

SEQ ID NO: 142771 - protein, 9 aa, Homo Sapiens
VSHPRYLEL

SEQ ID NO: 142772 - protein, 9 aa, Homo Sapiens
VSIAPLLEL

SEQ ID NO: 142773 - protein, 9 aa, Homo Sapiens
VSIRTGLEL

SEQ ID NO: 142774 - protein, 9 aa, Homo Sapiens
VSMPVFQSL

SEQ ID NO: 142775 - protein, 9 aa, Homo Sapiens
VSSPTMPHL

SEQ ID NO: 142776 - protein, 9 aa, Homo Sapiens
VSTPQIVSL

SEQ ID NO: 142777 - protein, 9 aa, Homo Sapiens
VSVPYPSSL

SEQ ID NO: 142778 - protein, 9 aa, Homo Sapiens
VSYPLSLEL

SEQ ID NO: 142779 - protein, 9 aa, Homo Sapiens
VTDHNLHEL

SEQ ID NO: 142780 - protein, 9 aa, Homo Sapiens
VTIARAIEL

SEQ ID NO: 142781 - protein, 9 aa, Homo Sapiens
VTVPPGPSL

SEQ ID NO: 142782 - protein, 9 aa, Homo Sapiens
VTVQPSPYL

SEQ ID NO: 142783 - protein, 9 aa, Homo Sapiens
VTVRPGLAM

SEQ ID NO: 142784 - protein, 9 aa, Homo Sapiens
VVAPAGITL

SEQ ID NO: 142785 - protein, 9 aa, Homo Sapiens
VVAPAGVTL

SEQ ID NO: 142786 - protein, 9 aa, Homo Sapiens
VVAPPGVVV

SEQ ID NO: 142787 - protein, 9 aa, Homo Sapiens
VVIEPISEL

SEQ ID NO: 142788 - protein, 9 aa, Homo Sapiens
VVIGKMLIL

SEQ ID NO: 142789 - protein, 9 aa, Homo Sapiens
VVIGNIGAL

SEQ ID NO: 142790 - protein, 9 aa, Homo Sapiens
VVKPPGSSL

SEQ ID NO: 142791 - protein, 9 aa, Homo Sapiens
VVNGAFMVL

SEQ ID NO: 142792 - protein, 9 aa, Homo Sapiens
VVNGRVLEL

SEQ ID NO: 142793 - protein, 9 aa, Homo Sapiens
VVVAVGRAL

SEQ ID NO: 142794 - protein, 9 aa, Homo Sapiens
VVVDPIQSV

SEQ ID NO: 142795 - protein, 9 aa, Homo Sapiens
VVVQPYNSL

SEQ ID NO: 142796 - protein, 9 aa, Homo Sapiens
WADAMAKVL

SEQ ID NO: 142797 - protein, 9 aa, Homo Sapiens
WAEWGHREL

SEQ ID NO: 142798 - protein, 9 aa, Homo Sapiens
WAMDLRPEL

SEQ ID NO: 142799 - protein, 9 aa, Homo Sapiens
WAQPGGAAF

SEQ ID NO: 142800 - protein, 9 aa, Homo Sapiens
WASEVGPVL

SEQ ID NO: 142801 - protein, 9 aa, Homo Sapiens
WASPPGRWL

SEQ ID NO: 142802 - protein, 9 aa, Homo Sapiens
WAVSPETEL

SEQ ID NO: 142803 - protein, 9 aa, Homo Sapiens
WAVTGVSSL

SEQ ID NO: 142804 - protein, 9 aa, Homo Sapiens
WAYPRQVFI

SEQ ID NO: 142805 - protein, 9 aa, Homo Sapiens
WQNPHMLFL

SEQ ID NO: 142806 - protein, 9 aa, Homo Sapiens
WSQDLFRAL

SEQ ID NO: 142807 - protein, 9 aa, Homo Sapiens
YAADNQIYI

SEQ ID NO: 142808 - protein, 9 aa, Homo Sapiens
YAAGAKLVL

SEQ ID NO: 142809 - protein, 9 aa, Homo Sapiens
YAANPGQLF

SEQ ID NO: 142810 - protein, 9 aa, Homo Sapiens
YAAPHFFHL

SEQ ID NO: 142811 - protein, 9 aa, Homo Sapiens
YAAPWFLTL

SEQ ID NO: 142812 - protein, 9 aa, Homo Sapiens
YAAQAHLKL

SEQ ID NO: 142813 - protein, 9 aa, Homo Sapiens
YAASAIGYL

SEQ ID NO: 142814 - protein, 9 aa, Homo Sapiens
YAASDMLQL

SEQ ID NO: 142815 - protein, 9 aa, Homo Sapiens
YAAYPLTEV

SEQ ID NO: 142816 - protein, 9 aa, Homo Sapiens
YADPSILYI

SEQ ID NO: 142817 - protein, 9 aa, Homo Sapiens
YADVGGKQF

SEQ ID NO: 142818 - protein, 9 aa, Homo Sapiens
YADVIVHRL

SEQ ID NO: 142819 - protein, 9 aa, Homo Sapiens
YAEDRERFF

SEQ ID NO: 142820 - protein, 9 aa, Homo Sapiens
YAEEFRTYL

SEQ ID NO: 142821 - protein, 9 aa, Homo Sapiens
YAEIVHLTL

SEQ ID NO: 142822 - protein, 9 aa, Homo Sapiens
YAENAMRYI

SEQ ID NO: 142823 - protein, 9 aa, Homo Sapiens
YAETIAHIL

SEQ ID NO: 142824 - protein, 9 aa, Homo Sapiens
YAEVGRVLL

SEQ ID NO: 142825 - protein, 9 aa, Homo Sapiens
YAFDFARQS

SEQ ID NO: 142826 - protein, 9 aa, Homo Sapiens
YAFGGGCEL

SEQ ID NO: 142827 - protein, 9 aa, Homo Sapiens
YAFNHSADF

SEQ ID NO: 142828 - protein, 9 aa, Homo Sapiens
YAFPKAVSV

SEQ ID NO: 142829 - protein, 9 aa, Homo Sapiens
YAFPKAVTV

SEQ ID NO: 142830 - protein, 9 aa, Homo Sapiens
YAFPKSITV

SEQ ID NO: 142831 - protein, 9 aa, Homo Sapiens
YAFPLAHSL

SEQ ID NO: 142832 - protein, 9 aa, Homo Sapiens
YAFPVSNNL

SEQ ID NO: 142833 - protein, 9 aa, Homo Sapiens
YAFQDDRYL

SEQ ID NO: 142834 - protein, 9 aa, Homo Sapiens
YAFSGVEEL

SEQ ID NO: 142835 - protein, 9 aa, Homo Sapiens
YAFSPRNSL

SEQ ID NO: 142836 - protein, 9 aa, Homo Sapiens
YAFTALDAL

SEQ ID NO: 142837 - protein, 9 aa, Homo Sapiens
YAFVRPVIL

SEQ ID NO: 142838 - protein, 9 aa, Homo Sapiens
YAGDVSMFL

SEQ ID NO: 142839 - protein, 9 aa, Homo Sapiens
YAGYIPQAF

SEQ ID NO: 142840 - protein, 9 aa, Homo Sapiens
YAHLTPREL

SEQ ID NO: 142841 - protein, 9 aa, Homo Sapiens
YAHLTYVTL

SEQ ID NO: 142842 - protein, 9 aa, Homo Sapiens
YAIARFKFL

SEQ ID NO: 142843 - protein, 9 aa, Homo Sapiens
YAIDNPLHY

SEQ ID NO: 142844 - protein, 9 aa, Homo Sapiens
YAIEKVREI

SEQ ID NO: 142845 - protein, 9 aa, Homo Sapiens
YAIESQLQL

SEQ ID NO: 142846 - protein, 9 aa, Homo Sapiens
YAIEVDPVL

SEQ ID NO: 142847 - protein, 9 aa, Homo Sapiens
YAIFKSQDF

SEQ ID NO: 142848 - protein, 9 aa, Homo Sapiens
YAIGLVMRL

SEQ ID NO: 142849 - protein, 9 aa, Homo Sapiens
YAIGVSHPL

SEQ ID NO: 142850 - protein, 9 aa, Homo Sapiens
YAIHGVLEV

SEQ ID NO: 142851 - protein, 9 aa, Homo Sapiens
YAINFIHAT

SEQ ID NO: 142852 - protein, 9 aa, Homo Sapiens
YAINQPDVL

SEQ ID NO: 142853 - protein, 9 aa, Homo Sapiens
YAIPKFKHL

SEQ ID NO: 142854 - protein, 9 aa, Homo Sapiens
YAIRGVPSL

SEQ ID NO: 142855 - protein, 9 aa, Homo Sapiens
YAISKPEVL

SEQ ID NO: 142856 - protein, 9 aa, Homo Sapiens
YAISPGLDI

SEQ ID NO: 142857 - protein, 9 aa, Homo Sapiens
YAITTLHNL

SEQ ID NO: 142858 - protein, 9 aa, Homo Sapiens
YAKDDPLEF

SEQ ID NO: 142859 - protein, 9 aa, Homo Sapiens
YAKRPGIGL

SEQ ID NO: 142860 - protein, 9 aa, Homo Sapiens
YALDLSTFL

SEQ ID NO: 142861 - protein, 9 aa, Homo Sapiens
YALERLKVM

SEQ ID NO: 142862 - protein, 9 aa, Homo Sapiens
YALGALNHL

SEQ ID NO: 142863 - protein, 9 aa, Homo Sapiens
YALLGRTLL

SEQ ID NO: 142864 - protein, 9 aa, Homo Sapiens
YALNHTLSV

SEQ ID NO: 142865 - protein, 9 aa, Homo Sapiens
YALPAGLEV

SEQ ID NO: 142866 - protein, 9 aa, Homo Sapiens
YALPAGLSA

SEQ ID NO: 142867 - protein, 9 aa, Homo Sapiens
YALPKSLSV

SEQ ID NO: 142868 - protein, 9 aa, Homo Sapiens
YALTAIMKL

SEQ ID NO: 142869 - protein, 9 aa, Homo Sapiens
YALTSPLQL

SEQ ID NO: 142870 - protein, 9 aa, Homo Sapiens
YAMDELRSL

SEQ ID NO: 142871 - protein, 9 aa, Homo Sapiens
YAMDIVKGL

SEQ ID NO: 142872 - protein, 9 aa, Homo Sapiens
YAMISSPFM

SEQ ID NO: 142873 - protein, 9 aa, Homo Sapiens
YANAKIYKL

SEQ ID NO: 142874 - protein, 9 aa, Homo Sapiens
YANAVLQAL

SEQ ID NO: 142875 - protein, 9 aa, Homo Sapiens
YANDVTRVL

SEQ ID NO: 142876 - protein, 9 aa, Homo Sapiens
YANFNRIIL

SEQ ID NO: 142877 - protein, 9 aa, Homo Sapiens
YANSKAVTL

SEQ ID NO: 142878 - protein, 9 aa, Homo Sapiens
YANYYTREV

SEQ ID NO: 142879 - protein, 9 aa, Homo Sapiens
YAPYPSPVL

SEQ ID NO: 142880 - protein, 9 aa, Homo Sapiens
YAQIRTIAI

SEQ ID NO: 142881 - protein, 9 aa, Homo Sapiens
YAQLHSLTL

SEQ ID NO: 142882 - protein, 9 aa, Homo Sapiens
YASDYFDQL

SEQ ID NO: 142883 - protein, 9 aa, Homo Sapiens
YASGINVNL

SEQ ID NO: 142884 - protein, 9 aa, Homo Sapiens
YASLRIEEL

SEQ ID NO: 142885 - protein, 9 aa, Homo Sapiens
YASNITSVL

SEQ ID NO: 142886 - protein, 9 aa, Homo Sapiens
YASSPGMSL

SEQ ID NO: 142887 - protein, 9 aa, Homo Sapiens
YATIILSKM

SEQ ID NO: 142888 - protein, 9 aa, Homo Sapiens
YATLFAQAL

SEQ ID NO: 142889 - protein, 9 aa, Homo Sapiens
YAVELFEGL

SEQ ID NO: 142890 - protein, 9 aa, Homo Sapiens
YAVGGYTRL

SEQ ID NO: 142891 - protein, 9 aa, Homo Sapiens
YAVGIQQVL

SEQ ID NO: 142892 - protein, 9 aa, Homo Sapiens
YAVHEGLGL

SEQ ID NO: 142893 - protein, 9 aa, Homo Sapiens
YAVNSQFTM

SEQ ID NO: 142894 - protein, 9 aa, Homo Sapiens
YAVRDTIAL

SEQ ID NO: 142895 - protein, 9 aa, Homo Sapiens
YAVTGDVKM

SEQ ID NO: 142896 - protein, 9 aa, Homo Sapiens
YAYAAQNLL

SEQ ID NO: 142897 - protein, 9 aa, Homo Sapiens
YAYDGKDYI

SEQ ID NO: 142898 - protein, 9 aa, Homo Sapiens
YAYEKPHVV

SEQ ID NO: 142899 - protein, 9 aa, Homo Sapiens
YAYETKDAL

SEQ ID NO: 142900 - protein, 9 aa, Homo Sapiens
YAYFNFPEL

SEQ ID NO: 142901 - protein, 9 aa, Homo Sapiens
YAYGQYNMP

SEQ ID NO: 142902 - protein, 9 aa, Homo Sapiens
YAYLKAIVL

SEQ ID NO: 142903 - protein, 9 aa, Homo Sapiens
YAYLYIRML

SEQ ID NO: 142904 - protein, 9 aa, Homo Sapiens
YAYPGVLLI

SEQ ID NO: 142905 - protein, 9 aa, Homo Sapiens
YAYRDAVFL

SEQ ID NO: 142906 - protein, 9 aa, Homo Sapiens
YAYTGRLEL

SEQ ID NO: 142907 - protein, 9 aa, Homo Sapiens
YCIPVVQSL

SEQ ID NO: 142908 - protein, 9 aa, Homo Sapiens
YCTEIFDYL

SEQ ID NO: 142909 - protein, 9 aa, Homo Sapiens
YFNPHTVTL

SEQ ID NO: 142910 - protein, 9 aa, Homo Sapiens
YGDLGGPII

SEQ ID NO: 142911 - protein, 9 aa, Homo Sapiens
YGFQYPLAM

SEQ ID NO: 142912 - protein, 9 aa, Homo Sapiens
YGIEHALAL

SEQ ID NO: 142913 - protein, 9 aa, Homo Sapiens
YGINNIREL

SEQ ID NO: 142914 - protein, 9 aa, Homo Sapiens
YGITSPISL

SEQ ID NO: 142915 - protein, 9 aa, Homo Sapiens
YGLDLHPTI

SEQ ID NO: 142916 - protein, 9 aa, Homo Sapiens
YGNPNTLRL

SEQ ID NO: 142917 - protein, 9 aa, Homo Sapiens
YGSFVTRAL

SEQ ID NO: 142918 - protein, 9 aa, Homo Sapiens
YGSPGILEF

SEQ ID NO: 142919 - protein, 9 aa, Homo Sapiens
YGSPNALVL

SEQ ID NO: 142920 - protein, 9 aa, Homo Sapiens
YGVTVFKAL

SEQ ID NO: 142921 - protein, 9 aa, Homo Sapiens
YGYEHILTL

SEQ ID NO: 142922 - protein, 9 aa, Homo Sapiens
YGYSNPKIL

SEQ ID NO: 142923 - protein, 9 aa, Homo Sapiens
YIDDVFHAL

SEQ ID NO: 142924 - protein, 9 aa, Homo Sapiens
YIDEGRLVL

SEQ ID NO: 142925 - protein, 9 aa, Homo Sapiens
YIIDPQNGL

SEQ ID NO: 142926 - protein, 9 aa, Homo Sapiens
YIIIPKSSL

SEQ ID NO: 142927 - protein, 9 aa, Homo Sapiens
YIIPVVLFL

SEQ ID NO: 142928 - protein, 9 aa, Homo Sapiens
YIIVPPLTL

SEQ ID NO: 142929 - protein, 9 aa, Homo Sapiens
YILDPKQAL

SEQ ID NO: 142930 - protein, 9 aa, Homo Sapiens
YILGKFFAL

SEQ ID NO: 142931 - protein, 9 aa, Homo Sapiens
YILPFSEVL

SEQ ID NO: 142932 - protein, 9 aa, Homo Sapiens
YILPWESEL

SEQ ID NO: 142933 - protein, 9 aa, Homo Sapiens
YIMDWMDEM

SEQ ID NO: 142934 - protein, 9 aa, Homo Sapiens
YINPRAVQL

SEQ ID NO: 142935 - protein, 9 aa, Homo Sapiens
YISAKPLEM

SEQ ID NO: 142936 - protein, 9 aa, Homo Sapiens
YITAAYVEM

SEQ ID NO: 142937 - protein, 9 aa, Homo Sapiens
YITDFLARL

SEQ ID NO: 142938 - protein, 9 aa, Homo Sapiens
YITDLFQVL

SEQ ID NO: 142939 - protein, 9 aa, Homo Sapiens
YITGHVLVV

SEQ ID NO: 142940 - protein, 9 aa, Homo Sapiens
YIVDHTIIM

SEQ ID NO: 142941 - protein, 9 aa, Homo Sapiens
YIVKWPLSL

SEQ ID NO: 142942 - protein, 9 aa, Homo Sapiens
YIYPNIIAM

SEQ ID NO: 142943 - protein, 9 aa, Homo Sapiens
YLADIFTKL

SEQ ID NO: 142944 - protein, 9 aa, Homo Sapiens
YLADVTNAL

SEQ ID NO: 142945 - protein, 9 aa, Homo Sapiens
YLAPHVRTL

SEQ ID NO: 142946 - protein, 9 aa, Homo Sapiens
YLFERIKEL

SEQ ID NO: 142947 - protein, 9 aa, Homo Sapiens
YLIARVMLL

SEQ ID NO: 142948 - protein, 9 aa, Homo Sapiens
YLIEPDVEL

SEQ ID NO: 142949 - protein, 9 aa, Homo Sapiens
YLIGVHASL

SEQ ID NO: 142950 - protein, 9 aa, Homo Sapiens
YLIPFSSKL

SEQ ID NO: 142951 - protein, 9 aa, Homo Sapiens
YLLDHFLSM

SEQ ID NO: 142952 - protein, 9 aa, Homo Sapiens
YLLDLHSYL

SEQ ID NO: 142953 - protein, 9 aa, Homo Sapiens
YLLEKSRAI

SEQ ID NO: 142954 - protein, 9 aa, Homo Sapiens
YLLEKSRIV

SEQ ID NO: 142955 - protein, 9 aa, Homo Sapiens
YLLEKSRVI

SEQ ID NO: 142956 - protein, 9 aa, Homo Sapiens
YLLESVNKL

SEQ ID NO: 142957 - protein, 9 aa, Homo Sapiens
YLNETFSEL

SEQ ID NO: 142958 - protein, 9 aa, Homo Sapiens
YLNEWLQIL

SEQ ID NO: 142959 - protein, 9 aa, Homo Sapiens
YLQDEFRIL

SEQ ID NO: 142960 - protein, 9 aa, Homo Sapiens
YLQIHPQEL

SEQ ID NO: 142961 - protein, 9 aa, Homo Sapiens
YLTAEILEL

SEQ ID NO: 142962 - protein, 9 aa, Homo Sapiens
YLVPQARAL

SEQ ID NO: 142963 - protein, 9 aa, Homo Sapiens
YMDAPKAAL

SEQ ID NO: 142964 - protein, 9 aa, Homo Sapiens
YMIAHITGL

SEQ ID NO: 142965 - protein, 9 aa, Homo Sapiens
YMLEHVITL

SEQ ID NO: 142966 - protein, 9 aa, Homo Sapiens
YMYQLFRSL

SEQ ID NO: 142967 - protein, 9 aa, Homo Sapiens
YNIDSHLLL

SEQ ID NO: 142968 - protein, 9 aa, Homo Sapiens
YQEKGVRVL

SEQ ID NO: 142969 - protein, 9 aa, Homo Sapiens
YQEVGAKVL

SEQ ID NO: 142970 - protein, 9 aa, Homo Sapiens
YQIAVTKVL

SEQ ID NO: 142971 - protein, 9 aa, Homo Sapiens
YQIPTENSM

SEQ ID NO: 142972 - protein, 9 aa, Homo Sapiens
YQMEMMRSL

SEQ ID NO: 142973 - protein, 9 aa, Homo Sapiens
YQNPQITQL

SEQ ID NO: 142974 - protein, 9 aa, Homo Sapiens
YQQELEREL

SEQ ID NO: 142975 - protein, 9 aa, Homo Sapiens
YQVGVHYEL

SEQ ID NO: 142976 - protein, 9 aa, Homo Sapiens
YQYLLVTAL

SEQ ID NO: 142977 - protein, 9 aa, Homo Sapiens
YQYPRPLLI

SEQ ID NO: 142978 - protein, 9 aa, Homo Sapiens
YSADGHSIL

SEQ ID NO: 142979 - protein, 9 aa, Homo Sapiens
YSAEPLPEL

SEQ ID NO: 142980 - protein, 9 aa, Homo Sapiens
YSAPVIHVL

SEQ ID NO: 142981 - protein, 9 aa, Homo Sapiens
YSDDIPHAL

SEQ ID NO: 142982 - protein, 9 aa, Homo Sapiens
YSDDTLKQL

SEQ ID NO: 142983 - protein, 9 aa, Homo Sapiens
YSDFVVHEI

SEQ ID NO: 142984 - protein, 9 aa, Homo Sapiens
YSDPRFLNL

SEQ ID NO: 142985 - protein, 9 aa, Homo Sapiens
YSDSFPMEL

SEQ ID NO: 142986 - protein, 9 aa, Homo Sapiens
YSFDYPSDM

SEQ ID NO: 142987 - protein, 9 aa, Homo Sapiens
YSFHKFHYL

SEQ ID NO: 142988 - protein, 9 aa, Homo Sapiens
YSFYNQQTL

SEQ ID NO: 142989 - protein, 9 aa, Homo Sapiens
YSIAQFKYL

SEQ ID NO: 142990 - protein, 9 aa, Homo Sapiens
YSIGPNSKL

SEQ ID NO: 142991 - protein, 9 aa, Homo Sapiens
YSINMNVFL

SEQ ID NO: 142992 - protein, 9 aa, Homo Sapiens
YSIVGLSSL

SEQ ID NO: 142993 - protein, 9 aa, Homo Sapiens
YSIYVYKVL

SEQ ID NO: 142994 - protein, 9 aa, Homo Sapiens
YSKLPGVSL

SEQ ID NO: 142995 - protein, 9 aa, Homo Sapiens
YSLAAALTL

SEQ ID NO: 142996 - protein, 9 aa, Homo Sapiens
YSLDHISSL

SEQ ID NO: 142997 - protein, 9 aa, Homo Sapiens
YSLPNAPTL

SEQ ID NO: 142998 - protein, 9 aa, Homo Sapiens
YSLQPPSAL

SEQ ID NO: 142999 - protein, 9 aa, Homo Sapiens
YSMPISIEF

SEQ ID NO: 143000 - protein, 9 aa, Homo Sapiens
YSMPSTHAM

SEQ ID NO: 143001 - protein, 9 aa, Homo Sapiens
YSMPVHAAV

SEQ ID NO: 143002 - protein, 9 aa, Homo Sapiens
YSQSPALEL

SEQ ID NO: 143003 - protein, 9 aa, Homo Sapiens
YSSPFDPVL

SEQ ID NO: 143004 - protein, 9 aa, Homo Sapiens
YSTDENLIL

SEQ ID NO: 143005 - protein, 9 aa, Homo Sapiens
YSVPFYPTF

SEQ ID NO: 143006 - protein, 9 aa, Homo Sapiens
YSVRVSPQM

SEQ ID NO: 143007 - protein, 9 aa, Homo Sapiens
YSVYVYKVL

SEQ ID NO: 143008 - protein, 9 aa, Homo Sapiens
YSWVGRPLL

SEQ ID NO: 143009 - protein, 9 aa, Homo Sapiens
YSYDLSHSL

SEQ ID NO: 143010 - protein, 9 aa, Homo Sapiens
YSYFSPRTM

SEQ ID NO: 143011 - protein, 9 aa, Homo Sapiens
YTAFARLSL

SEQ ID NO: 143012 - protein, 9 aa, Homo Sapiens
YTFSEPFHL

SEQ ID NO: 143013 - protein, 9 aa, Homo Sapiens
YTIENPRHF

SEQ ID NO: 143014 - protein, 9 aa, Homo Sapiens
YTIHFIEEM

SEQ ID NO: 143015 - protein, 9 aa, Homo Sapiens
YTIMSPAVL

SEQ ID NO: 143016 - protein, 9 aa, Homo Sapiens
YTIPAHQNL

SEQ ID NO: 143017 - protein, 9 aa, Homo Sapiens
YTIPLAIKL

SEQ ID NO: 143018 - protein, 9 aa, Homo Sapiens
YTIPLSPVL

SEQ ID NO: 143019 - protein, 9 aa, Homo Sapiens
YTIPPGHQV

SEQ ID NO: 143020 - protein, 9 aa, Homo Sapiens
YTLINHRVL

SEQ ID NO: 143021 - protein, 9 aa, Homo Sapiens
YTLLHNPTL

SEQ ID NO: 143022 - protein, 9 aa, Homo Sapiens
YTMVYWHAL

SEQ ID NO: 143023 - protein, 9 aa, Homo Sapiens
YTNPSGIVL

SEQ ID NO: 143024 - protein, 9 aa, Homo Sapiens
YTSEVQAIL

SEQ ID NO: 143025 - protein, 9 aa, Homo Sapiens
YTSGTFRTV

SEQ ID NO: 143026 - protein, 9 aa, Homo Sapiens
YTSPVNPAV

SEQ ID NO: 143027 - protein, 9 aa, Homo Sapiens
YTTDFIFNL

SEQ ID NO: 143028 - protein, 9 aa, Homo Sapiens
YTTDFIYQL

SEQ ID NO: 143029 - protein, 9 aa, Homo Sapiens
YTTDRVMTV

SEQ ID NO: 143030 - protein, 9 aa, Homo Sapiens
YTVLTRIGL

SEQ ID NO: 143031 - protein, 9 aa, Homo Sapiens
YTVPAGMTV

SEQ ID NO: 143032 - protein, 9 aa, Homo Sapiens
YVAQAGLEL

SEQ ID NO: 143033 - protein, 9 aa, Homo Sapiens
YVDPVNKVL

SEQ ID NO: 143034 - protein, 9 aa, Homo Sapiens
YVENQFREF

SEQ ID NO: 143035 - protein, 9 aa, Homo Sapiens
YVFPGVTRL

SEQ ID NO: 143036 - protein, 9 aa, Homo Sapiens
YVHPFIFAL

SEQ ID NO: 143037 - protein, 9 aa, Homo Sapiens
YVIAYIRDL

SEQ ID NO: 143038 - protein, 9 aa, Homo Sapiens
YVIDPIKGL

SEQ ID NO: 143039 - protein, 9 aa, Homo Sapiens
YVINVTTHL

SEQ ID NO: 143040 - protein, 9 aa, Homo Sapiens
YVIPDWKVV

SEQ ID NO: 143041 - protein, 9 aa, Homo Sapiens
YVIQKFFEF

SEQ ID NO: 143042 - protein, 9 aa, Homo Sapiens
YVLEHNLHL

SEQ ID NO: 143043 - protein, 9 aa, Homo Sapiens
YVNLPTIAL

SEQ ID NO: 143044 - protein, 9 aa, Homo Sapiens
YVPDTTISL

SEQ ID NO: 143045 - protein, 9 aa, Homo Sapiens
YVQDPFAAL

SEQ ID NO: 143046 - protein, 9 aa, Homo Sapiens
YVQIPGMEI

SEQ ID NO: 143047 - protein, 9 aa, Homo Sapiens
YVSPRILTA

SEQ ID NO: 143048 - protein, 9 aa, Homo Sapiens
YVTSVILHI

SEQ ID NO: 143049 - protein, 9 aa, Homo Sapiens
YVVDDAAVL

SEQ ID NO: 143050 - protein, 9 aa, Homo Sapiens
YVVPGETAL

SEQ ID NO: 143051 - protein, 9 aa, Homo Sapiens
YVVPYMIHL

SEQ ID NO: 143052 - protein, 9 aa, Homo Sapiens
YVVPYTIHL

SEQ ID NO: 143053 - protein, 9 aa, Homo Sapiens
YVYERMTGL

SEQ ID NO: 143054 - protein, 9 aa, Homo Sapiens
YVYSGVETL

SEQ ID NO: 143055 - protein, 9 aa, Homo Sapiens
YVYSHFLQF

SEQ ID NO: 143056 - protein, 9 aa, Homo Sapiens
YYVDFFKTL

SEQ ID NO: 143057 - protein, 10 aa, Homo Sapiens
AAAPVPTTTL

SEQ ID NO: 143058 - protein, 10 aa, Homo Sapiens
AADPGLHETL

SEQ ID NO: 143059 - protein, 10 aa, Homo Sapiens
AAFEALGTAL

SEQ ID NO: 143060 - protein, 10 aa, Homo Sapiens
AAFPGASLYL

SEQ ID NO: 143061 - protein, 10 aa, Homo Sapiens
AAIDPRVQYL

SEQ ID NO: 143062 - protein, 10 aa, Homo Sapiens
AAIKPGTPLY

SEQ ID NO: 143063 - protein, 10 aa, Homo Sapiens
AAINPELLQL

SEQ ID NO: 143064 - protein, 10 aa, Homo Sapiens
AALWPIMTAL

SEQ ID NO: 143065 - protein, 10 aa, Homo Sapiens
AAYAFAPATL

SEQ ID NO: 143066 - protein, 10 aa, Homo Sapiens
AAYGFRLQSL

SEQ ID NO: 143067 - protein, 10 aa, Homo Sapiens
AEISMALGHL

SEQ ID NO: 143068 - protein, 10 aa, Homo Sapiens
ATPEQPVLDL

SEQ ID NO: 143069 - protein, 10 aa, Homo Sapiens
CAVNPKFVAL

SEQ ID NO: 143070 - protein, 10 aa, Homo Sapiens
CAVPPPNFEM

SEQ ID NO: 143071 - protein, 10 aa, Homo Sapiens
FAAPTTGNQI

SEQ ID NO: 143072 - protein, 10 aa, Homo Sapiens
FAASPSELHL

SEQ ID NO: 143073 - protein, 10 aa, Homo Sapiens
FAATADPAAL

SEQ ID NO: 143074 - protein, 10 aa, Homo Sapiens
FADDTYPRWV

SEQ ID NO: 143075 - protein, 10 aa, Homo Sapiens
FADPEVLRRL

SEQ ID NO: 143076 - protein, 10 aa, Homo Sapiens
FADPHSKRVF

SEQ ID NO: 143077 - protein, 10 aa, Homo Sapiens
FADPVDVNPF

SEQ ID NO: 143078 - protein, 10 aa, Homo Sapiens
FADSHELSEL

SEQ ID NO: 143079 - protein, 10 aa, Homo Sapiens
FAEALATHIL

SEQ ID NO: 143080 - protein, 10 aa, Homo Sapiens
FAEMLTGKTL

SEQ ID NO: 143081 - protein, 10 aa, Homo Sapiens
FAESGWRSAL

SEQ ID NO: 143082 - protein, 10 aa, Homo Sapiens
FAFESDLHSL

SEQ ID NO: 143083 - protein, 10 aa, Homo Sapiens
FAFSPDGKFL

SEQ ID NO: 143084 - protein, 10 aa, Homo Sapiens
FAFSPDGRHL

SEQ ID NO: 143085 - protein, 10 aa, Homo Sapiens
FAHVGQLTGM

SEQ ID NO: 143086 - protein, 10 aa, Homo Sapiens
FAIDSSHPWL

SEQ ID NO: 143087 - protein, 10 aa, Homo Sapiens
FAINIDNKDL

SEQ ID NO: 143088 - protein, 10 aa, Homo Sapiens
FAINSNNPWL

SEQ ID NO: 143089 - protein, 10 aa, Homo Sapiens
FAIPMIHAVL

SEQ ID NO: 143090 - protein, 10 aa, Homo Sapiens
FAIRGLAEAL

SEQ ID NO: 143091 - protein, 10 aa, Homo Sapiens
FAIRWGFIPL

SEQ ID NO: 143092 - protein, 10 aa, Homo Sapiens
FAITEPLVTF

SEQ ID NO: 143093 - protein, 10 aa, Homo Sapiens
FAIVASDTRL

SEQ ID NO: 143094 - protein, 10 aa, Homo Sapiens
FALDGLKQVM

SEQ ID NO: 143095 - protein, 10 aa, Homo Sapiens
FALGGNKQAL

SEQ ID NO: 143096 - protein, 10 aa, Homo Sapiens
FALGLPFLVL

SEQ ID NO: 143097 - protein, 10 aa, Homo Sapiens
FALPYVDHFL

SEQ ID NO: 143098 - protein, 10 aa, Homo Sapiens
FAMTGERVDL

SEQ ID NO: 143099 - protein, 10 aa, Homo Sapiens
FAPKMSEIIL

SEQ ID NO: 143100 - protein, 10 aa, Homo Sapiens
FAQQNSGHFL

SEQ ID NO: 143101 - protein, 10 aa, Homo Sapiens
FASPTSPPVL

SEQ ID NO: 143102 - protein, 10 aa, Homo Sapiens
FASTILHLVV

SEQ ID NO: 143103 - protein, 10 aa, Homo Sapiens
FATFPSSAFL

SEQ ID NO: 143104 - protein, 10 aa, Homo Sapiens
FATLTRPLAL

SEQ ID NO: 143105 - protein, 10 aa, Homo Sapiens
FAVDPQITSL

SEQ ID NO: 143106 - protein, 10 aa, Homo Sapiens
FAVEPQGPAL

SEQ ID NO: 143107 - protein, 10 aa, Homo Sapiens
FAVIGSTEEL

SEQ ID NO: 143108 - protein, 10 aa, Homo Sapiens
FAVSSKVTSM

SEQ ID NO: 143109 - protein, 10 aa, Homo Sapiens
FAVVNHQGTL

SEQ ID NO: 143110 - protein, 10 aa, Homo Sapiens
FAYGGHPYPF

SEQ ID NO: 143111 - protein, 10 aa, Homo Sapiens
FAYGQNKTAF

SEQ ID NO: 143112 - protein, 10 aa, Homo Sapiens
FAYPNRPDVL

SEQ ID NO: 143113 - protein, 10 aa, Homo Sapiens
FICPVVGLEM

SEQ ID NO: 143114 - protein, 10 aa, Homo Sapiens
FIMEGGAMVL

SEQ ID NO: 143115 - protein, 10 aa, Homo Sapiens
FINVPPQIAL

SEQ ID NO: 143116 - protein, 10 aa, Homo Sapiens
FIPEHTNLSL

SEQ ID NO: 143117 - protein, 10 aa, Homo Sapiens
FIVPTGKTGL

SEQ ID NO: 143118 - protein, 10 aa, Homo Sapiens
FIYPSNMQTM

SEQ ID NO: 143119 - protein, 10 aa, Homo Sapiens
FLESGGFRSL

SEQ ID NO: 143120 - protein, 10 aa, Homo Sapiens
FLIENPKTSL

SEQ ID NO: 143121 - protein, 10 aa, Homo Sapiens
FLPEFAGTQL

SEQ ID NO: 143122 - protein, 10 aa, Homo Sapiens
FLPTSLPPEL

SEQ ID NO: 143123 - protein, 10 aa, Homo Sapiens
FLSEHPNVTL

SEQ ID NO: 143124 - protein, 10 aa, Homo Sapiens
FLVNHDFSPL

SEQ ID NO: 143125 - protein, 10 aa, Homo Sapiens
FQLPYNGVVL

SEQ ID NO: 143126 - protein, 10 aa, Homo Sapiens
FQYPVRPASM

SEQ ID NO: 143127 - protein, 10 aa, Homo Sapiens
FSAPTPIQAL

SEQ ID NO: 143128 - protein, 10 aa, Homo Sapiens
FSDIQTGRVL

SEQ ID NO: 143129 - protein, 10 aa, Homo Sapiens
FSELSNPESL

SEQ ID NO: 143130 - protein, 10 aa, Homo Sapiens
FSFGGKLVTF

SEQ ID NO: 143131 - protein, 10 aa, Homo Sapiens
FSINAQRNAL

SEQ ID NO: 143132 - protein, 10 aa, Homo Sapiens
FSVPDVPKSM

SEQ ID NO: 143133 - protein, 10 aa, Homo Sapiens
FSVPPTEETL

SEQ ID NO: 143134 - protein, 10 aa, Homo Sapiens
FSYGFDGRGL

SEQ ID NO: 143135 - protein, 10 aa, Homo Sapiens
FSYQGRASSL

SEQ ID NO: 143136 - protein, 10 aa, Homo Sapiens
FTIPHTQEAF

SEQ ID NO: 143137 - protein, 10 aa, Homo Sapiens
FTLDPLYREL

SEQ ID NO: 143138 - protein, 10 aa, Homo Sapiens
FTMGGPAISM

SEQ ID NO: 143139 - protein, 10 aa, Homo Sapiens
FTQPSRLLSL

SEQ ID NO: 143140 - protein, 10 aa, Homo Sapiens
FVAPPGNISL

SEQ ID NO: 143141 - protein, 10 aa, Homo Sapiens
FVAPWNSLSL

SEQ ID NO: 143142 - protein, 10 aa, Homo Sapiens
FVDPNGKISL

SEQ ID NO: 143143 - protein, 10 aa, Homo Sapiens
FVLPATPPQL

SEQ ID NO: 143144 - protein, 10 aa, Homo Sapiens
FVMEGEPPKL

SEQ ID NO: 143145 - protein, 10 aa, Homo Sapiens
FVPPQGSPTM

SEQ ID NO: 143146 - protein, 10 aa, Homo Sapiens
GAIGGTPPAF

SEQ ID NO: 143147 - protein, 10 aa, Homo Sapiens
GAVLPSGNTL

SEQ ID NO: 143148 - protein, 10 aa, Homo Sapiens
HALPPSLIPL

SEQ ID NO: 143149 - protein, 10 aa, Homo Sapiens
HIYDNQGIEL

SEQ ID NO: 143150 - protein, 10 aa, Homo Sapiens
HYMPPPYASL

SEQ ID NO: 143151 - protein, 10 aa, Homo Sapiens
IADNHTPKEL

SEQ ID NO: 143152 - protein, 10 aa, Homo Sapiens
IAISPLLSSF

SEQ ID NO: 143153 - protein, 10 aa, Homo Sapiens
IAISRTPVLM

SEQ ID NO: 143154 - protein, 10 aa, Homo Sapiens
IAMENIHSEM

SEQ ID NO: 143155 - protein, 10 aa, Homo Sapiens
IAVDPRHLSL

SEQ ID NO: 143156 - protein, 10 aa, Homo Sapiens
IAVPASNSGL

SEQ ID NO: 143157 - protein, 10 aa, Homo Sapiens
IAVPAVLPSF

SEQ ID NO: 143158 - protein, 10 aa, Homo Sapiens
IAWKGDTLVL

SEQ ID NO: 143159 - protein, 10 aa, Homo Sapiens
IAWSPDDNYL

SEQ ID NO: 143160 - protein, 10 aa, Homo Sapiens
ISIEGNKMPL

SEQ ID NO: 143161 - protein, 10 aa, Homo Sapiens
ISNGELFQVL

SEQ ID NO: 143162 - protein, 10 aa, Homo Sapiens
ISVDSRSVSL

SEQ ID NO: 143163 - protein, 10 aa, Homo Sapiens
KAIGNAFAVL

SEQ ID NO: 143164 - protein, 10 aa, Homo Sapiens
KAVDPSSVAL

SEQ ID NO: 143165 - protein, 10 aa, Homo Sapiens
KAYTSQFVSL

SEQ ID NO: 143166 - protein, 10 aa, Homo Sapiens
KTPDFESTGL

SEQ ID NO: 143167 - protein, 10 aa, Homo Sapiens
LAAPGHPPVL

SEQ ID NO: 143168 - protein, 10 aa, Homo Sapiens
LAFDPSGQRL

SEQ ID NO: 143169 - protein, 10 aa, Homo Sapiens
LAFSNDGTTL

SEQ ID NO: 143170 - protein, 10 aa, Homo Sapiens
LAFSVTGTSL

SEQ ID NO: 143171 - protein, 10 aa, Homo Sapiens
LAHIYTELQL

SEQ ID NO: 143172 - protein, 10 aa, Homo Sapiens
LAINGSNLPR

SEQ ID NO: 143173 - protein, 10 aa, Homo Sapiens
LALPGKPPFL

SEQ ID NO: 143174 - protein, 10 aa, Homo Sapiens
LAMGVNLTSM

SEQ ID NO: 143175 - protein, 10 aa, Homo Sapiens
LASPLDPQAL

SEQ ID NO: 143176 - protein, 10 aa, Homo Sapiens
LATDFIQSLL

SEQ ID NO: 143177 - protein, 10 aa, Homo Sapiens
LAVDPNGAFL

SEQ ID NO: 143178 - protein, 10 aa, Homo Sapiens
LAVDPNGIYL

SEQ ID NO: 143179 - protein, 10 aa, Homo Sapiens
LAVEHDNISL

SEQ ID NO: 143180 - protein, 10 aa, Homo Sapiens
LAVHPSGVAL

SEQ ID NO: 143181 - protein, 10 aa, Homo Sapiens
LAYPARPAQL

SEQ ID NO: 143182 - protein, 10 aa, Homo Sapiens
LAYSGKLEEL

SEQ ID NO: 143183 - protein, 10 aa, Homo Sapiens
LGIPYAQPPL

SEQ ID NO: 143184 - protein, 10 aa, Homo Sapiens
LLDPNIYRTM

SEQ ID NO: 143185 - protein, 10 aa, Homo Sapiens
LLYPFAPLIL

SEQ ID NO: 143186 - protein, 10 aa, Homo Sapiens
LQPPKPLSSL

SEQ ID NO: 143187 - protein, 10 aa, Homo Sapiens
LSDVNVERVL

SEQ ID NO: 143188 - protein, 10 aa, Homo Sapiens
LSFETTEESL

SEQ ID NO: 143189 - protein, 10 aa, Homo Sapiens
LSSPFPSSSF

SEQ ID NO: 143190 - protein, 10 aa, Homo Sapiens
LSYPQTDVFL

SEQ ID NO: 143191 - protein, 10 aa, Homo Sapiens
LVHPNPPSVL

SEQ ID NO: 143192 - protein, 10 aa, Homo Sapiens
LVVEGQAVSL

SEQ ID NO: 143193 - protein, 10 aa, Homo Sapiens
MAALPFTKSL

SEQ ID NO: 143194 - protein, 10 aa, Homo Sapiens
MAIAPNVTVM

SEQ ID NO: 143195 - protein, 10 aa, Homo Sapiens
MAIDIPHIWL

SEQ ID NO: 143196 - protein, 10 aa, Homo Sapiens
MAYGASFLSF

SEQ ID NO: 143197 - protein, 10 aa, Homo Sapiens
MAYHGLTVPL

SEQ ID NO: 143198 - protein, 10 aa, Homo Sapiens
MFINIKSILW

SEQ ID NO: 143199 - protein, 10 aa, Homo Sapiens
MVPPVQVSPL

SEQ ID NO: 143200 - protein, 10 aa, Homo Sapiens
PELQPLAGSL

SEQ ID NO: 143201 - protein, 10 aa, Homo Sapiens
PEVKFNWYVD

SEQ ID NO: 143202 - protein, 10 aa, Homo Sapiens
PPPPQQERSK

SEQ ID NO: 143203 - protein, 10 aa, Homo Sapiens
QAIEPYITNF

SEQ ID NO: 143204 - protein, 10 aa, Homo Sapiens
RAMEGELGEL

SEQ ID NO: 143205 - protein, 10 aa, Homo Sapiens
SAAFPYGGVL

SEQ ID NO: 143206 - protein, 10 aa, Homo Sapiens
SAMDLPDVTL

SEQ ID NO: 143207 - protein, 10 aa, Homo Sapiens
SAVPGDLLTL

SEQ ID NO: 143208 - protein, 10 aa, Homo Sapiens
SFFENPILSF

SEQ ID NO: 143209 - protein, 10 aa, Homo Sapiens
SIIDPFGMPM

SEQ ID NO: 143210 - protein, 10 aa, Homo Sapiens
TAYPNRPMVL

SEQ ID NO: 143211 - protein, 10 aa, Homo Sapiens
VAAPPPKNSF

SEQ ID NO: 143212 - protein, 10 aa, Homo Sapiens
VADGIFKAEL

SEQ ID NO: 143213 - protein, 10 aa, Homo Sapiens
VAFLAMLLVL

SEQ ID NO: 143214 - protein, 10 aa, Homo Sapiens
VAFSPTGKYL

SEQ ID NO: 143215 - protein, 10 aa, Homo Sapiens
VALPGVAVSM

SEQ ID NO: 143216 - protein, 10 aa, Homo Sapiens
VAMNPTNTVF

SEQ ID NO: 143217 - protein, 10 aa, Homo Sapiens
VAMPGVPAFL

SEQ ID NO: 143218 - protein, 10 aa, Homo Sapiens
VAVPASLLGM

SEQ ID NO: 143219 - protein, 10 aa, Homo Sapiens
VAVVGDPIAL

SEQ ID NO: 143220 - protein, 10 aa, Homo Sapiens
VAYPRTGGTL

SEQ ID NO: 143221 - protein, 10 aa, Homo Sapiens
VAYSHDGAFL

SEQ ID NO: 143222 - protein, 10 aa, Homo Sapiens
VCAPPSRLTL

SEQ ID NO: 143223 - protein, 10 aa, Homo Sapiens
VGAPFTGSSL

SEQ ID NO: 143224 - protein, 10 aa, Homo Sapiens
VSIEPNFHSL

SEQ ID NO: 143225 - protein, 10 aa, Homo Sapiens
WADPTGTRKL

SEQ ID NO: 143226 - protein, 10 aa, Homo Sapiens
WAVEGTAVAL

SEQ ID NO: 143227 - protein, 10 aa, Homo Sapiens
YADPNFVRTF

SEQ ID NO: 143228 - protein, 10 aa, Homo Sapiens
YADPTKRLEL

SEQ ID NO: 143229 - protein, 10 aa, Homo Sapiens
YAFGRVFSGL

SEQ ID NO: 143230 - protein, 10 aa, Homo Sapiens
YAFNGTQRFL

SEQ ID NO: 143231 - protein, 10 aa, Homo Sapiens
YAFPKAVSVF

SEQ ID NO: 143232 - protein, 10 aa, Homo Sapiens
YAHPLETLIL

SEQ ID NO: 143233 - protein, 10 aa, Homo Sapiens
YAIENVETNL

SEQ ID NO: 143234 - protein, 10 aa, Homo Sapiens
YAIFDEGHML

SEQ ID NO: 143235 - protein, 10 aa, Homo Sapiens
YAIMPPLEQF

SEQ ID NO: 143236 - protein, 10 aa, Homo Sapiens
YALAARDVFL

SEQ ID NO: 143237 - protein, 10 aa, Homo Sapiens
YALCGFGGVL

SEQ ID NO: 143238 - protein, 10 aa, Homo Sapiens
YALDVRVNSL

SEQ ID NO: 143239 - protein, 10 aa, Homo Sapiens
YALGKDFVTL

SEQ ID NO: 143240 - protein, 10 aa, Homo Sapiens
YALPHAILRL

SEQ ID NO: 143241 - protein, 10 aa, Homo Sapiens
YALPHAIMRL

SEQ ID NO: 143242 - protein, 10 aa, Homo Sapiens
YAMASRDVFL

SEQ ID NO: 143243 - protein, 10 aa, Homo Sapiens
YAMRAFADAL

SEQ ID NO: 143244 - protein, 10 aa, Homo Sapiens
YASFIEDNEL

SEQ ID NO: 143245 - protein, 10 aa, Homo Sapiens
YATDVVEAFL

SEQ ID NO: 143246 - protein, 10 aa, Homo Sapiens
YAVDRAITHL

SEQ ID NO: 143247 - protein, 10 aa, Homo Sapiens
YAVEGRDLTL

SEQ ID NO: 143248 - protein, 10 aa, Homo Sapiens
YAVELVNDSL

SEQ ID NO: 143249 - protein, 10 aa, Homo Sapiens
YAVFNEDGSL

SEQ ID NO: 143250 - protein, 10 aa, Homo Sapiens
YAVPFIQPDL

SEQ ID NO: 143251 - protein, 10 aa, Homo Sapiens
YAVWFGGSML

SEQ ID NO: 143252 - protein, 10 aa, Homo Sapiens
YAYDGKDYIA

SEQ ID NO: 143253 - protein, 10 aa, Homo Sapiens
YCEPPTGVSL

SEQ ID NO: 143254 - protein, 10 aa, Homo Sapiens
YFIAPTGHSL

SEQ ID NO: 143255 - protein, 10 aa, Homo Sapiens
YFIPATGHSL

SEQ ID NO: 143256 - protein, 10 aa, Homo Sapiens
YFISPTGHSL

SEQ ID NO: 143257 - protein, 10 aa, Homo Sapiens
YFITPTGHSL

SEQ ID NO: 143258 - protein, 10 aa, Homo Sapiens
YIDEQFERYL

SEQ ID NO: 143259 - protein, 10 aa, Homo Sapiens
YIVMPNILVL

SEQ ID NO: 143260 - protein, 10 aa, Homo Sapiens
YLDPRITVAW

SEQ ID NO: 143261 - protein, 10 aa, Homo Sapiens
YLIQSVPAEL

SEQ ID NO: 143262 - protein, 10 aa, Homo Sapiens
YQDPSFHLSL

SEQ ID NO: 143263 - protein, 10 aa, Homo Sapiens
YSLFLPLHEL

SEQ ID NO: 143264 - protein, 10 aa, Homo Sapiens
YSWVGRPLLD

SEQ ID NO: 143265 - protein, 10 aa, Homo Sapiens
YTYESKMAFL

SEQ ID NO: 143266 - protein, 10 aa, Homo Sapiens
YVFDGKPPQL

SEQ ID NO: 143267 - protein, 10 aa, Homo Sapiens
YVIEPHSMEF

SEQ ID NO: 143268 - protein, 10 aa, Homo Sapiens
YVIGPKGNSL

SEQ ID NO: 143269 - protein, 10 aa, Homo Sapiens
YVIPHPVHAF

SEQ ID NO: 143270 - protein, 10 aa, Homo Sapiens
YVLDGSGHIL

SEQ ID NO: 143271 - protein, 11 aa, Homo Sapiens
AAAPAIMSYAE

SEQ ID NO: 143272 - protein, 11 aa, Homo Sapiens
AAAPPSPPFSF

SEQ ID NO: 143273 - protein, 11 aa, Homo Sapiens
AAFLAKDFNFL

SEQ ID NO: 143274 - protein, 11 aa, Homo Sapiens
AAFQPNQYQML

SEQ ID NO: 143275 - protein, 11 aa, Homo Sapiens
AAIDARIFHEL

SEQ ID NO: 143276 - protein, 11 aa, Homo Sapiens
AALPAELQREL

SEQ ID NO: 143277 - protein, 11 aa, Homo Sapiens
AALPDASPGNL

SEQ ID NO: 143278 - protein, 11 aa, Homo Sapiens
AAMASLGALAL

SEQ ID NO: 143279 - protein, 11 aa, Homo Sapiens
AAYYPSDVSSL

SEQ ID NO: 143280 - protein, 11 aa, Homo Sapiens
ATIDPDTISAL

SEQ ID NO: 143281 - protein, 11 aa, Homo Sapiens
DMNIAYALYLA

SEQ ID NO: 143282 - protein, 11 aa, Homo Sapiens
FAAVKDTILQL

SEQ ID NO: 143283 - protein, 11 aa, Homo Sapiens
FAEDTEAKNPF

SEQ ID NO: 143284 - protein, 11 aa, Homo Sapiens
FAFDSEGNYML

SEQ ID NO: 143285 - protein, 11 aa, Homo Sapiens
FAFEGIGDEDL

SEQ ID NO: 143286 - protein, 11 aa, Homo Sapiens
FAFESDLHSLL

SEQ ID NO: 143287 - protein, 11 aa, Homo Sapiens
FAFGENKMGQL

SEQ ID NO: 143288 - protein, 11 aa, Homo Sapiens
FAFQESPPRFL

SEQ ID NO: 143289 - protein, 11 aa, Homo Sapiens
FAHFPGLASEL

SEQ ID NO: 143290 - protein, 11 aa, Homo Sapiens
FAHGTAGLVFL

SEQ ID NO: 143291 - protein, 11 aa, Homo Sapiens
FAIADAAYKAM

SEQ ID NO: 143292 - protein, 11 aa, Homo Sapiens
FAINQEQKEAL

SEQ ID NO: 143293 - protein, 11 aa, Homo Sapiens
FAIYESLKKYL

SEQ ID NO: 143294 - protein, 11 aa, Homo Sapiens
FAKPVYPGQTL

SEQ ID NO: 143295 - protein, 11 aa, Homo Sapiens
FALAVRKGGAL

SEQ ID NO: 143296 - protein, 11 aa, Homo Sapiens
FALESGGGSIL

SEQ ID NO: 143297 - protein, 11 aa, Homo Sapiens
FALIPTALDAL

SEQ ID NO: 143298 - protein, 11 aa, Homo Sapiens
FALLTGPGSEL

SEQ ID NO: 143299 - protein, 11 aa, Homo Sapiens
FANTPKYSQVL

SEQ ID NO: 143300 - protein, 11 aa, Homo Sapiens
FAVADTVYRAL

SEQ ID NO: 143301 - protein, 11 aa, Homo Sapiens
FAVDNVGNRTL

SEQ ID NO: 143302 - protein, 11 aa, Homo Sapiens
FAVPIESDKTL

SEQ ID NO: 143303 - protein, 11 aa, Homo Sapiens
FAVPPALGSNL

SEQ ID NO: 143304 - protein, 11 aa, Homo Sapiens
FAVVATGETAL

SEQ ID NO: 143305 - protein, 11 aa, Homo Sapiens
FAWEPFRGLEL

SEQ ID NO: 143306 - protein, 11 aa, Homo Sapiens
FAYDGKDYLTL

SEQ ID NO: 143307 - protein, 11 aa, Homo Sapiens
FAYDPSNYEYL

SEQ ID NO: 143308 - protein, 11 aa, Homo Sapiens
FAYTGRTAQEL

SEQ ID NO: 143309 - protein, 11 aa, Homo Sapiens
FGISSVPTKGL

SEQ ID NO: 143310 - protein, 11 aa, Homo Sapiens
FILDPNQENVL

SEQ ID NO: 143311 - protein, 11 aa, Homo Sapiens
FIVPPPPEKSL

SEQ ID NO: 143312 - protein, 11 aa, Homo Sapiens
FLFDGSPTYVL

SEQ ID NO: 143313 - protein, 11 aa, Homo Sapiens
FLFKVRESGSL

SEQ ID NO: 143314 - protein, 11 aa, Homo Sapiens
FLLDPYKYMTL

SEQ ID NO: 143315 - protein, 11 aa, Homo Sapiens
FLWDVPSNWTL

SEQ ID NO: 143316 - protein, 11 aa, Homo Sapiens
FSDDPNVTKTL

SEQ ID NO: 143317 - protein, 11 aa, Homo Sapiens
FSDPTSKMRHL

SEQ ID NO: 143318 - protein, 11 aa, Homo Sapiens
FSIDVGYERFL

SEQ ID NO: 143319 - protein, 11 aa, Homo Sapiens
FSIMESPKEAL

SEQ ID NO: 143320 - protein, 11 aa, Homo Sapiens
FSLPENIQLSL

SEQ ID NO: 143321 - protein, 11 aa, Homo Sapiens
FSYESELFPTF

SEQ ID NO: 143322 - protein, 11 aa, Homo Sapiens
FTEPGAGLRAL

SEQ ID NO: 143323 - protein, 11 aa, Homo Sapiens
FTFSKDKLVAL

SEQ ID NO: 143324 - protein, 11 aa, Homo Sapiens
FYLPLDAIKQL

SEQ ID NO: 143325 - protein, 11 aa, Homo Sapiens
GFYPAEITLTW

SEQ ID NO: 143326 - protein, 11 aa, Homo Sapiens
GIHETTFNSIM

SEQ ID NO: 143327 - protein, 11 aa, Homo Sapiens
GVVDPRAISVL

SEQ ID NO: 143328 - protein, 11 aa, Homo Sapiens
HAFDSLSGISL

SEQ ID NO: 143329 - protein, 11 aa, Homo Sapiens
HAFGGLGSHAL

SEQ ID NO: 143330 - protein, 11 aa, Homo Sapiens
HAYDGKDYISL

SEQ ID NO: 143331 - protein, 11 aa, Homo Sapiens
HTIFASNTSSL

SEQ ID NO: 143332 - protein, 11 aa, Homo Sapiens
IAFDPRSAYYL

SEQ ID NO: 143333 - protein, 11 aa, Homo Sapiens
IAGPVLLILVH

SEQ ID NO: 143334 - protein, 11 aa, Homo Sapiens
IALDPDTMQAL

SEQ ID NO: 143335 - protein, 11 aa, Homo Sapiens
IECLPTSGHLS

SEQ ID NO: 143336 - protein, 11 aa, Homo Sapiens
IIHDPGRGAPL

SEQ ID NO: 143337 - protein, 11 aa, Homo Sapiens
LAIYHVIMSVL

SEQ ID NO: 143338 - protein, 11 aa, Homo Sapiens
LALDASQHSSL

SEQ ID NO: 143339 - protein, 11 aa, Homo Sapiens
LALKTGPTSGL

SEQ ID NO: 143340 - protein, 11 aa, Homo Sapiens
LARDPLAWENL

SEQ ID NO: 143341 - protein, 11 aa, Homo Sapiens
LAVDPNRAVPL

SEQ ID NO: 143342 - protein, 11 aa, Homo Sapiens
LAYLGAKPRSL

SEQ ID NO: 143343 - protein, 11 aa, Homo Sapiens
LSIEVNPNRPL

SEQ ID NO: 143344 - protein, 11 aa, Homo Sapiens
MAMSFDRYIAI

SEQ ID NO: 143345 - protein, 11 aa, Homo Sapiens
MSIYPSPTGVL

SEQ ID NO: 143346 - protein, 11 aa, Homo Sapiens
MSMEISIHRSL

SEQ ID NO: 143347 - protein, 11 aa, Homo Sapiens
PISLDLTFHLL

SEQ ID NO: 143348 - protein, 11 aa, Homo Sapiens
QAFSPSSLSSL

SEQ ID NO: 143349 - protein, 11 aa, Homo Sapiens
RAAPLDSIHSL

SEQ ID NO: 143350 - protein, 11 aa, Homo Sapiens
RAFEVSENGNL

SEQ ID NO: 143351 - protein, 11 aa, Homo Sapiens
SALRPSTSRSL

SEQ ID NO: 143352 - protein, 11 aa, Homo Sapiens
SIFFPSEGSNL

SEQ ID NO: 143353 - protein, 11 aa, Homo Sapiens
SIISPKVKMAL

SEQ ID NO: 143354 - protein, 11 aa, Homo Sapiens
TAIPVHDGYVL

SEQ ID NO: 143355 - protein, 11 aa, Homo Sapiens
TAISISDHTAL

SEQ ID NO: 143356 - protein, 11 aa, Homo Sapiens
TALDPDMIQAL

SEQ ID NO: 143357 - protein, 11 aa, Homo Sapiens
VAAPPTAVGSL

SEQ ID NO: 143358 - protein, 11 aa, Homo Sapiens
VAVDPSILARL

SEQ ID NO: 143359 - protein, 11 aa, Homo Sapiens
VAVFPKDHSSL

SEQ ID NO: 143360 - protein, 11 aa, Homo Sapiens
VAVHPSTVNPL

SEQ ID NO: 143361 - protein, 11 aa, Homo Sapiens
VAYPHDGKIFF

SEQ ID NO: 143362 - protein, 11 aa, Homo Sapiens
VAYRPISASVL

SEQ ID NO: 143363 - protein, 11 aa, Homo Sapiens
WALESDNNTAL

SEQ ID NO: 143364 - protein, 11 aa, Homo Sapiens
YADERLRINSL

SEQ ID NO: 143365 - protein, 11 aa, Homo Sapiens
YAFGQETNVPL

SEQ ID NO: 143366 - protein, 11 aa, Homo Sapiens
YAFQTEGKLYL

SEQ ID NO: 143367 - protein, 11 aa, Homo Sapiens
YAFQTGGKLYL

SEQ ID NO: 143368 - protein, 11 aa, Homo Sapiens
YAFRSAEPNAL

SEQ ID NO: 143369 - protein, 11 aa, Homo Sapiens
YAIEPGTPPLL

SEQ ID NO: 143370 - protein, 11 aa, Homo Sapiens
YAIGVSHPLSI

SEQ ID NO: 143371 - protein, 11 aa, Homo Sapiens
YAIRQSISKAL

SEQ ID NO: 143372 - protein, 11 aa, Homo Sapiens
YAISPGLDITF

SEQ ID NO: 143373 - protein, 11 aa, Homo Sapiens
YAKMGEMMLAL

SEQ ID NO: 143374 - protein, 11 aa, Homo Sapiens
YAMEQSIKSVL

SEQ ID NO: 143375 - protein, 11 aa, Homo Sapiens
YAMPTKTIEVL

SEQ ID NO: 143376 - protein, 11 aa, Homo Sapiens
YAVDAYFREAL

SEQ ID NO: 143377 - protein, 11 aa, Homo Sapiens
YAVDPAQLQAL

SEQ ID NO: 143378 - protein, 11 aa, Homo Sapiens
YAVPWQGTMTL

SEQ ID NO: 143379 - protein, 11 aa, Homo Sapiens
YAVTPLLEDAL

SEQ ID NO: 143380 - protein, 11 aa, Homo Sapiens
YAYDGKDYIAL

SEQ ID NO: 143381 - protein, 11 aa, Homo Sapiens
YAYGFEKPSAI

SEQ ID NO: 143382 - protein, 11 aa, Homo Sapiens
YAYPATAAAPM

SEQ ID NO: 143383 - protein, 11 aa, Homo Sapiens
YGAEALERMFL

SEQ ID NO: 143384 - protein, 11 aa, Homo Sapiens
YGLLPSHASYL

SEQ ID NO: 143385 - protein, 11 aa, Homo Sapiens
YIIGGSVINEL

SEQ ID NO: 143386 - protein, 11 aa, Homo Sapiens
YIMEPSIFNTL

SEQ ID NO: 143387 - protein, 11 aa, Homo Sapiens
YISVPKENSTL

SEQ ID NO: 143388 - protein, 11 aa, Homo Sapiens
YLHDQNPDAAL

SEQ ID NO: 143389 - protein, 11 aa, Homo Sapiens
YLIFTNEGRAL

SEQ ID NO: 143390 - protein, 11 aa, Homo Sapiens
YSHPVVSSVPL

SEQ ID NO: 143391 - protein, 11 aa, Homo Sapiens
YSLPTSFSGSF

SEQ ID NO: 143392 - protein, 11 aa, Homo Sapiens
YSYPAAVPQAL

SEQ ID NO: 143393 - protein, 11 aa, Homo Sapiens
YTIDPSNPMVL

SEQ ID NO: 143394 - protein, 11 aa, Homo Sapiens
YTLSPENLQSL

SEQ ID NO: 143395 - protein, 8 aa, Homo Sapiens
AFDALVTF

SEQ ID NO: 143396 - protein, 8 aa, Homo Sapiens
AFDEIVAL

SEQ ID NO: 143397 - protein, 8 aa, Homo Sapiens
AFDKHMNL

SEQ ID NO: 143398 - protein, 8 aa, Homo Sapiens
AFDMFNFL

SEQ ID NO: 143399 - protein, 8 aa, Homo Sapiens
AFDVEIHM

SEQ ID NO: 143400 - protein, 8 aa, Homo Sapiens
AFSWSSAF

SEQ ID NO: 143401 - protein, 8 aa, Homo Sapiens
ANDGFVRL

SEQ ID NO: 143402 - protein, 8 aa, Homo Sapiens
AYDIYSRL

SEQ ID NO: 143403 - protein, 8 aa, Homo Sapiens
AYDLEANL

SEQ ID NO: 143404 - protein, 8 aa, Homo Sapiens
AYDNFGVL

SEQ ID NO: 143405 - protein, 8 aa, Homo Sapiens
AYDVADMV

SEQ ID NO: 143406 - protein, 8 aa, Homo Sapiens
AYDVLIKM

SEQ ID NO: 143407 - protein, 8 aa, Homo Sapiens
AYDVTYSL

SEQ ID NO: 143408 - protein, 8 aa, Homo Sapiens
CYDALVHF

SEQ ID NO: 143409 - protein, 8 aa, Homo Sapiens
CYDNIHFM

SEQ ID NO: 143410 - protein, 8 aa, Homo Sapiens
DFDIPAEF

SEQ ID NO: 143411 - protein, 8 aa, Homo Sapiens
DFDLHSEL

SEQ ID NO: 143412 - protein, 8 aa, Homo Sapiens
DFRDGLKL

SEQ ID NO: 143413 - protein, 8 aa, Homo Sapiens
EADFPVYF

SEQ ID NO: 143414 - protein, 8 aa, Homo Sapiens
ESLIACKA

SEQ ID NO: 143415 - protein, 8 aa, Homo Sapiens
EVDMPVFF

SEQ ID NO: 143416 - protein, 8 aa, Homo Sapiens
FDPALLEF

SEQ ID NO: 143417 - protein, 8 aa, Homo Sapiens
FFDDIGYL

SEQ ID NO: 143418 - protein, 8 aa, Homo Sapiens
FFDDPMLL

SEQ ID NO: 143419 - protein, 8 aa, Homo Sapiens
FFDGAAVL

SEQ ID NO: 143420 - protein, 8 aa, Homo Sapiens
FFDHAAHL

SEQ ID NO: 143421 - protein, 8 aa, Homo Sapiens
FFDHSGTL

SEQ ID NO: 143422 - protein, 8 aa, Homo Sapiens
FFDIAHYL

SEQ ID NO: 143423 - protein, 8 aa, Homo Sapiens
FFDIASQI

SEQ ID NO: 143424 - protein, 8 aa, Homo Sapiens
FFDIFGRL

SEQ ID NO: 143425 - protein, 8 aa, Homo Sapiens
FFDLPDFL

SEQ ID NO: 143426 - protein, 8 aa, Homo Sapiens
FFDLPQQL

SEQ ID NO: 143427 - protein, 8 aa, Homo Sapiens
FFDRNLFF

SEQ ID NO: 143428 - protein, 8 aa, Homo Sapiens
FFEEFGKL

SEQ ID NO: 143429 - protein, 8 aa, Homo Sapiens
FFEIYNEL

SEQ ID NO: 143430 - protein, 8 aa, Homo Sapiens
FFESFGDL

SEQ ID NO: 143431 - protein, 8 aa, Homo Sapiens
FFSEYEKL

SEQ ID NO: 143432 - protein, 8 aa, Homo Sapiens
FFVPHGYL

SEQ ID NO: 143433 - protein, 8 aa, Homo Sapiens
FGDACVYL

SEQ ID NO: 143434 - protein, 8 aa, Homo Sapiens
FIDKPVCF

SEQ ID NO: 143435 - protein, 8 aa, Homo Sapiens
FLDEEVKL

SEQ ID NO: 143436 - protein, 8 aa, Homo Sapiens
FLDEYIFL

SEQ ID NO: 143437 - protein, 8 aa, Homo Sapiens
FLDKPTLL

SEQ ID NO: 143438 - protein, 8 aa, Homo Sapiens
FLDLEQHL

SEQ ID NO: 143439 - protein, 8 aa, Homo Sapiens
FLDVAGLL

SEQ ID NO: 143440 - protein, 8 aa, Homo Sapiens
FMDPASAL

SEQ ID NO: 143441 - protein, 8 aa, Homo Sapiens
FNDTFVHV

SEQ ID NO: 143442 - protein, 8 aa, Homo Sapiens
FQDAYVLL

SEQ ID NO: 143443 - protein, 8 aa, Homo Sapiens
FSDGAVSL

SEQ ID NO: 143444 - protein, 8 aa, Homo Sapiens
FSDVEAHF

SEQ ID NO: 143445 - protein, 8 aa, Homo Sapiens
FTDVEASL

SEQ ID NO: 143446 - protein, 8 aa, Homo Sapiens
FVDNHVEL

SEQ ID NO: 143447 - protein, 8 aa, Homo Sapiens
FVDQFVEL

SEQ ID NO: 143448 - protein, 8 aa, Homo Sapiens
FVDTEIRL

SEQ ID NO: 143449 - protein, 8 aa, Homo Sapiens
FWDGKIVL

SEQ ID NO: 143450 - protein, 8 aa, Homo Sapiens
FWDNVVYI

SEQ ID NO: 143451 - protein, 8 aa, Homo Sapiens
FYDDVTTL

SEQ ID NO: 143452 - protein, 8 aa, Homo Sapiens
FYDEVSRL

SEQ ID NO: 143453 - protein, 8 aa, Homo Sapiens
FYDFFRYV

SEQ ID NO: 143454 - protein, 8 aa, Homo Sapiens
FYDIVAEL

SEQ ID NO: 143455 - protein, 8 aa, Homo Sapiens
FYDKFILL

SEQ ID NO: 143456 - protein, 8 aa, Homo Sapiens
FYDPPRRL

SEQ ID NO: 143457 - protein, 8 aa, Homo Sapiens
FYDPTHAW

SEQ ID NO: 143458 - protein, 8 aa, Homo Sapiens
FYDRAEYL

SEQ ID NO: 143459 - protein, 8 aa, Homo Sapiens
FYDTFHTV

SEQ ID NO: 143460 - protein, 8 aa, Homo Sapiens
FYEGVVEL

SEQ ID NO: 143461 - protein, 8 aa, Homo Sapiens
FYQEHPDL

SEQ ID NO: 143462 - protein, 8 aa, Homo Sapiens
GFDDTVKF

SEQ ID NO: 143463 - protein, 8 aa, Homo Sapiens
GFDDVVRL

SEQ ID NO: 143464 - protein, 8 aa, Homo Sapiens
GKDIVWFL

SEQ ID NO: 143465 - protein, 8 aa, Homo Sapiens
GYDAVVLL

SEQ ID NO: 143466 - protein, 8 aa, Homo Sapiens
GYDGPIYM

SEQ ID NO: 143467 - protein, 8 aa, Homo Sapiens
HFDGLIFV

SEQ ID NO: 143468 - protein, 8 aa, Homo Sapiens
HFDHAVRM

SEQ ID NO: 143469 - protein, 8 aa, Homo Sapiens
HFDLAVEV

SEQ ID NO: 143470 - protein, 8 aa, Homo Sapiens
HFDLHEEM

SEQ ID NO: 143471 - protein, 8 aa, Homo Sapiens
HFDLPWYL

SEQ ID NO: 143472 - protein, 8 aa, Homo Sapiens
HFDMHGFL

SEQ ID NO: 143473 - protein, 8 aa, Homo Sapiens
HFDPEVYL

SEQ ID NO: 143474 - protein, 8 aa, Homo Sapiens
HFDPVIQL

SEQ ID NO: 143475 - protein, 8 aa, Homo Sapiens
HFDSVMQL

SEQ ID NO: 143476 - protein, 8 aa, Homo Sapiens
HFDTPVQF

SEQ ID NO: 143477 - protein, 8 aa, Homo Sapiens
HFDVTVKM

SEQ ID NO: 143478 - protein, 8 aa, Homo Sapiens
HLDRPVFL

SEQ ID NO: 143479 - protein, 8 aa, Homo Sapiens
HMDETVSF

SEQ ID NO: 143480 - protein, 8 aa, Homo Sapiens
HNDTWVLL

SEQ ID NO: 143481 - protein, 8 aa, Homo Sapiens
HVDVVVNF

SEQ ID NO: 143482 - protein, 8 aa, Homo Sapiens
HWDSEVFI

SEQ ID NO: 143483 - protein, 8 aa, Homo Sapiens
HWDVVTCL

SEQ ID NO: 143484 - protein, 8 aa, Homo Sapiens
HYDLNQLL

SEQ ID NO: 143485 - protein, 8 aa, Homo Sapiens
IADKVVFL

SEQ ID NO: 143486 - protein, 8 aa, Homo Sapiens
IFCVHGGL

SEQ ID NO: 143487 - protein, 8 aa, Homo Sapiens
IFDEAEKL

SEQ ID NO: 143488 - protein, 8 aa, Homo Sapiens
IFDEGHML

SEQ ID NO: 143489 - protein, 8 aa, Homo Sapiens
IFDEIHYM

SEQ ID NO: 143490 - protein, 8 aa, Homo Sapiens
IFDEINLM

SEQ ID NO: 143491 - protein, 8 aa, Homo Sapiens
IFDEVHYI

SEQ ID NO: 143492 - protein, 8 aa, Homo Sapiens
IFDIATEL

SEQ ID NO: 143493 - protein, 8 aa, Homo Sapiens
IFDIPGRL

SEQ ID NO: 143494 - protein, 8 aa, Homo Sapiens
IFDITNNL

SEQ ID NO: 143495 - protein, 8 aa, Homo Sapiens
IFDLSEVL

SEQ ID NO: 143496 - protein, 8 aa, Homo Sapiens
IFDLSNHL

SEQ ID NO: 143497 - protein, 8 aa, Homo Sapiens
IFDLSSEF

SEQ ID NO: 143498 - protein, 8 aa, Homo Sapiens
IFDLTSHL

SEQ ID NO: 143499 - protein, 8 aa, Homo Sapiens
IFDNFSNL

SEQ ID NO: 143500 - protein, 8 aa, Homo Sapiens
IFDNTTSL

SEQ ID NO: 143501 - protein, 8 aa, Homo Sapiens
IFDVGALL

SEQ ID NO: 143502 - protein, 8 aa, Homo Sapiens
IFDVGTRL

SEQ ID NO: 143503 - protein, 8 aa, Homo Sapiens
IFDVHTKI

SEQ ID NO: 143504 - protein, 8 aa, Homo Sapiens
IFEPFGKI

SEQ ID NO: 143505 - protein, 8 aa, Homo Sapiens
IFEPFGRI

SEQ ID NO: 143506 - protein, 8 aa, Homo Sapiens
IFSENDIF

SEQ ID NO: 143507 - protein, 8 aa, Homo Sapiens
IIAVDWLL

SEQ ID NO: 143508 - protein, 8 aa, Homo Sapiens
IIDDRVIL

SEQ ID NO: 143509 - protein, 8 aa, Homo Sapiens
IIDKEVSL

SEQ ID NO: 143510 - protein, 8 aa, Homo Sapiens
ILDEAVEL

SEQ ID NO: 143511 - protein, 8 aa, Homo Sapiens
INDERVFV

SEQ ID NO: 143512 - protein, 8 aa, Homo Sapiens
ISDFAVFL

SEQ ID NO: 143513 - protein, 8 aa, Homo Sapiens
ITDGQIFL

SEQ ID NO: 143514 - protein, 8 aa, Homo Sapiens
ITDLPIKL

SEQ ID NO: 143515 - protein, 8 aa, Homo Sapiens
ITDLYTDL

SEQ ID NO: 143516 - protein, 8 aa, Homo Sapiens
IVDEGALL

SEQ ID NO: 143517 - protein, 8 aa, Homo Sapiens
IVDRPVTL

SEQ ID NO: 143518 - protein, 8 aa, Homo Sapiens
IWDGLILL

SEQ ID NO: 143519 - protein, 8 aa, Homo Sapiens
IWDINAML

SEQ ID NO: 143520 - protein, 8 aa, Homo Sapiens
IYDALIYM

SEQ ID NO: 143521 - protein, 8 aa, Homo Sapiens
IYDEVVKL

SEQ ID NO: 143522 - protein, 8 aa, Homo Sapiens
IYDFIGEF

SEQ ID NO: 143523 - protein, 8 aa, Homo Sapiens
IYDGFDGF

SEQ ID NO: 143524 - protein, 8 aa, Homo Sapiens
IYDIFQKL

SEQ ID NO: 143525 - protein, 8 aa, Homo Sapiens
IYDIILDM

SEQ ID NO: 143526 - protein, 8 aa, Homo Sapiens
IYDIPEMF

SEQ ID NO: 143527 - protein, 8 aa, Homo Sapiens
IYDITNVL

SEQ ID NO: 143528 - protein, 8 aa, Homo Sapiens
IYDMSTVM

SEQ ID NO: 143529 - protein, 8 aa, Homo Sapiens
IYDNPNLI

SEQ ID NO: 143530 - protein, 8 aa, Homo Sapiens
IYDPFAGM

SEQ ID NO: 143531 - protein, 8 aa, Homo Sapiens
IYDRFGRL

SEQ ID NO: 143532 - protein, 8 aa, Homo Sapiens
IYDTHSLM

SEQ ID NO: 143533 - protein, 8 aa, Homo Sapiens
IYDVLIRL

SEQ ID NO: 143534 - protein, 8 aa, Homo Sapiens
IYDVSHNI

SEQ ID NO: 143535 - protein, 8 aa, Homo Sapiens
KFDEVVSL

SEQ ID NO: 143536 - protein, 8 aa, Homo Sapiens
KLDDTVYL

SEQ ID NO: 143537 - protein, 8 aa, Homo Sapiens
KLDVVVRF

SEQ ID NO: 143538 - protein, 8 aa, Homo Sapiens
KSDVEAIF

SEQ ID NO: 143539 - protein, 8 aa, Homo Sapiens
KVDMPITV

SEQ ID NO: 143540 - protein, 8 aa, Homo Sapiens
KVDQEVKL

SEQ ID NO: 143541 - protein, 8 aa, Homo Sapiens
LDTDFIVL

SEQ ID NO: 143542 - protein, 8 aa, Homo Sapiens
LFDAHQDL

SEQ ID NO: 143543 - protein, 8 aa, Homo Sapiens
LFDAHVEF

SEQ ID NO: 143544 - protein, 8 aa, Homo Sapiens
LFDAVIRL

SEQ ID NO: 143545 - protein, 8 aa, Homo Sapiens
LFDAVSSL

SEQ ID NO: 143546 - protein, 8 aa, Homo Sapiens
LFDDVGTF

SEQ ID NO: 143547 - protein, 8 aa, Homo Sapiens
LFDHVGCL

SEQ ID NO: 143548 - protein, 8 aa, Homo Sapiens
LFDNPRTF

SEQ ID NO: 143549 - protein, 8 aa, Homo Sapiens
LFDQANKL

SEQ ID NO: 143550 - protein, 8 aa, Homo Sapiens
LFDRQGFL

SEQ ID NO: 143551 - protein, 8 aa, Homo Sapiens
LFDRVVTL

SEQ ID NO: 143552 - protein, 8 aa, Homo Sapiens
LFDSLSTL

SEQ ID NO: 143553 - protein, 8 aa, Homo Sapiens
LFDSVIHL

SEQ ID NO: 143554 - protein, 8 aa, Homo Sapiens
LFDTAISL

SEQ ID NO: 143555 - protein, 8 aa, Homo Sapiens
LFDVHSIL

SEQ ID NO: 143556 - protein, 8 aa, Homo Sapiens
LFDVHSVL

SEQ ID NO: 143557 - protein, 8 aa, Homo Sapiens
LFDVHTTL

SEQ ID NO: 143558 - protein, 8 aa, Homo Sapiens
LFDVTGQV

SEQ ID NO: 143559 - protein, 8 aa, Homo Sapiens
LFDYEVRL

SEQ ID NO: 143560 - protein, 8 aa, Homo Sapiens
LFESPVYL

SEQ ID NO: 143561 - protein, 8 aa, Homo Sapiens
LFNVAHTL

SEQ ID NO: 143562 - protein, 8 aa, Homo Sapiens
LMDKVVRL

SEQ ID NO: 143563 - protein, 8 aa, Homo Sapiens
LYDGFQYL

SEQ ID NO: 143564 - protein, 8 aa, Homo Sapiens
LYDIANVL

SEQ ID NO: 143565 - protein, 8 aa, Homo Sapiens
LYDVSNIL

SEQ ID NO: 143566 - protein, 8 aa, Homo Sapiens
LYDVVSVL

SEQ ID NO: 143567 - protein, 8 aa, Homo Sapiens
MFDEPVLL

SEQ ID NO: 143568 - protein, 8 aa, Homo Sapiens
NFDATCLL

SEQ ID NO: 143569 - protein, 8 aa, Homo Sapiens
NFDDKVML

SEQ ID NO: 143570 - protein, 8 aa, Homo Sapiens
NFDLHQQL

SEQ ID NO: 143571 - protein, 8 aa, Homo Sapiens
NFDNPLGM

SEQ ID NO: 143572 - protein, 8 aa, Homo Sapiens
NFDNPVYL

SEQ ID NO: 143573 - protein, 8 aa, Homo Sapiens
NFDPTANL

SEQ ID NO: 143574 - protein, 8 aa, Homo Sapiens
NFDVATHV

SEQ ID NO: 143575 - protein, 8 aa, Homo Sapiens
NFMCHSML

SEQ ID NO: 143576 - protein, 8 aa, Homo Sapiens
NMDGPISL

SEQ ID NO: 143577 - protein, 8 aa, Homo Sapiens
NTDEMVEL

SEQ ID NO: 143578 - protein, 8 aa, Homo Sapiens
NYDRFHYL

SEQ ID NO: 143579 - protein, 8 aa, Homo Sapiens
NYDVNVIM

SEQ ID NO: 143580 - protein, 8 aa, Homo Sapiens
NYDYAVYL

SEQ ID NO: 143581 - protein, 8 aa, Homo Sapiens
QFDGGVVL

SEQ ID NO: 143582 - protein, 8 aa, Homo Sapiens
QFDGLVEL

SEQ ID NO: 143583 - protein, 8 aa, Homo Sapiens
QFDVATHL

SEQ ID NO: 143584 - protein, 8 aa, Homo Sapiens
RFDEATQL

SEQ ID NO: 143585 - protein, 8 aa, Homo Sapiens
RFDGYVFL

SEQ ID NO: 143586 - protein, 8 aa, Homo Sapiens
RFDNFSSL

SEQ ID NO: 143587 - protein, 8 aa, Homo Sapiens
RFDPFNFL

SEQ ID NO: 143588 - protein, 8 aa, Homo Sapiens
RFDTAFFL

SEQ ID NO: 143589 - protein, 8 aa, Homo Sapiens
RIDEPILL

SEQ ID NO: 143590 - protein, 8 aa, Homo Sapiens
RWDVSSFF

SEQ ID NO: 143591 - protein, 8 aa, Homo Sapiens
SFDAAVAL

SEQ ID NO: 143592 - protein, 8 aa, Homo Sapiens
SFDDIIVF

SEQ ID NO: 143593 - protein, 8 aa, Homo Sapiens
SFDFHFGF

SEQ ID NO: 143594 - protein, 8 aa, Homo Sapiens
SFDGIIAM

SEQ ID NO: 143595 - protein, 8 aa, Homo Sapiens
SFDGTIKV

SEQ ID NO: 143596 - protein, 8 aa, Homo Sapiens
SFDMAQVF

SEQ ID NO: 143597 - protein, 8 aa, Homo Sapiens
SFDPSRTF

SEQ ID NO: 143598 - protein, 8 aa, Homo Sapiens
SFDSTVRL

SEQ ID NO: 143599 - protein, 8 aa, Homo Sapiens
SFDVSQKF

SEQ ID NO: 143600 - protein, 8 aa, Homo Sapiens
SFDWTVKL

SEQ ID NO: 143601 - protein, 8 aa, Homo Sapiens
SLDEAVIM

SEQ ID NO: 143602 - protein, 8 aa, Homo Sapiens
SLDEVVLL

SEQ ID NO: 143603 - protein, 8 aa, Homo Sapiens
SLDSPVLL

SEQ ID NO: 143604 - protein, 8 aa, Homo Sapiens
SMDEKVEL

SEQ ID NO: 143605 - protein, 8 aa, Homo Sapiens
SWDKTVRL

SEQ ID NO: 143606 - protein, 8 aa, Homo Sapiens
SWDLVTCF

SEQ ID NO: 143607 - protein, 8 aa, Homo Sapiens
SWDQTVKL

SEQ ID NO: 143608 - protein, 8 aa, Homo Sapiens
SYDDTVKL

SEQ ID NO: 143609 - protein, 8 aa, Homo Sapiens
SYDIAACL

SEQ ID NO: 143610 - protein, 8 aa, Homo Sapiens
SYDVFSLL

SEQ ID NO: 143611 - protein, 8 aa, Homo Sapiens
SYDVIIRM

SEQ ID NO: 143612 - protein, 8 aa, Homo Sapiens
SYLDVYLI

SEQ ID NO: 143613 - protein, 8 aa, Homo Sapiens
TFDMFNFL

SEQ ID NO: 143614 - protein, 8 aa, Homo Sapiens
TFDPAALL

SEQ ID NO: 143615 - protein, 8 aa, Homo Sapiens
TFDPFCYL

SEQ ID NO: 143616 - protein, 8 aa, Homo Sapiens
TFDPFLYL

SEQ ID NO: 143617 - protein, 8 aa, Homo Sapiens
TFDPIAKM

SEQ ID NO: 143618 - protein, 8 aa, Homo Sapiens
TFDPVTKM

SEQ ID NO: 143619 - protein, 8 aa, Homo Sapiens
TFDSEVEL

SEQ ID NO: 143620 - protein, 8 aa, Homo Sapiens
TFDSTIHF

SEQ ID NO: 143621 - protein, 8 aa, Homo Sapiens
TFDVHLDL

SEQ ID NO: 143622 - protein, 8 aa, Homo Sapiens
TFDVYTKL

SEQ ID NO: 143623 - protein, 8 aa, Homo Sapiens
TFDYHQKL

SEQ ID NO: 143624 - protein, 8 aa, Homo Sapiens
TIDGVVFV

SEQ ID NO: 143625 - protein, 8 aa, Homo Sapiens
TLDSPAHL

SEQ ID NO: 143626 - protein, 8 aa, Homo Sapiens
TYDEVISF

SEQ ID NO: 143627 - protein, 8 aa, Homo Sapiens
TYDISQLF

SEQ ID NO: 143628 - protein, 8 aa, Homo Sapiens
VFDAFLNM

SEQ ID NO: 143629 - protein, 8 aa, Homo Sapiens
VFDALIYI

SEQ ID NO: 143630 - protein, 8 aa, Homo Sapiens
VFDDMINL

SEQ ID NO: 143631 - protein, 8 aa, Homo Sapiens
VFDEAVRV

SEQ ID NO: 143632 - protein, 8 aa, Homo Sapiens
VFDESLNF

SEQ ID NO: 143633 - protein, 8 aa, Homo Sapiens
VFDEVVQI

SEQ ID NO: 143634 - protein, 8 aa, Homo Sapiens
VFDINAEV

SEQ ID NO: 143635 - protein, 8 aa, Homo Sapiens
VFDLAQAL

SEQ ID NO: 143636 - protein, 8 aa, Homo Sapiens
VFDLAQTL

SEQ ID NO: 143637 - protein, 8 aa, Homo Sapiens
VFDLIQEL

SEQ ID NO: 143638 - protein, 8 aa, Homo Sapiens
VFDLPESL

SEQ ID NO: 143639 - protein, 8 aa, Homo Sapiens
VFDLSEKL

SEQ ID NO: 143640 - protein, 8 aa, Homo Sapiens
VFDLVRTL

SEQ ID NO: 143641 - protein, 8 aa, Homo Sapiens
VFDNLIQL

SEQ ID NO: 143642 - protein, 8 aa, Homo Sapiens
VFDNQLTI

SEQ ID NO: 143643 - protein, 8 aa, Homo Sapiens
VFDPHGTL

SEQ ID NO: 143644 - protein, 8 aa, Homo Sapiens
VFDPIGHF

SEQ ID NO: 143645 - protein, 8 aa, Homo Sapiens
VFDPVTKL

SEQ ID NO: 143646 - protein, 8 aa, Homo Sapiens
VFDQIIEL

SEQ ID NO: 143647 - protein, 8 aa, Homo Sapiens
VFDQYLNF

SEQ ID NO: 143648 - protein, 8 aa, Homo Sapiens
VFDRHKML

SEQ ID NO: 143649 - protein, 8 aa, Homo Sapiens
VFDRHVVL

SEQ ID NO: 143650 - protein, 8 aa, Homo Sapiens
VFDTSLQV

SEQ ID NO: 143651 - protein, 8 aa, Homo Sapiens
VFDTSQFF

SEQ ID NO: 143652 - protein, 8 aa, Homo Sapiens
VFDVGGLL

SEQ ID NO: 143653 - protein, 8 aa, Homo Sapiens
VFEYHNVL

SEQ ID NO: 143654 - protein, 8 aa, Homo Sapiens
VFFCHGEL

SEQ ID NO: 143655 - protein, 8 aa, Homo Sapiens
VFMTHLEF

SEQ ID NO: 143656 - protein, 8 aa, Homo Sapiens
VFSLSSEF

SEQ ID NO: 143657 - protein, 8 aa, Homo Sapiens
VIDAAVLL

SEQ ID NO: 143658 - protein, 8 aa, Homo Sapiens
VIDECVEM

SEQ ID NO: 143659 - protein, 8 aa, Homo Sapiens
VIDEPVRL

SEQ ID NO: 143660 - protein, 8 aa, Homo Sapiens
VLDAEVLL

SEQ ID NO: 143661 - protein, 8 aa, Homo Sapiens
VLDELVRP

SEQ ID NO: 143662 - protein, 8 aa, Homo Sapiens
VLDMHGFL

SEQ ID NO: 143663 - protein, 8 aa, Homo Sapiens
VLDVANHF

SEQ ID NO: 143664 - protein, 8 aa, Homo Sapiens
VLDVHAEL

SEQ ID NO: 143665 - protein, 8 aa, Homo Sapiens
VLDVSNSF

SEQ ID NO: 143666 - protein, 8 aa, Homo Sapiens
VMDDEVFM

SEQ ID NO: 143667 - protein, 8 aa, Homo Sapiens
VMDSPVHL

SEQ ID NO: 143668 - protein, 8 aa, Homo Sapiens
VTDDLVCL

SEQ ID NO: 143669 - protein, 8 aa, Homo Sapiens
VTDEPVYI

SEQ ID NO: 143670 - protein, 8 aa, Homo Sapiens
VVDEAVLV

SEQ ID NO: 143671 - protein, 8 aa, Homo Sapiens
VVDEEVFF

SEQ ID NO: 143672 - protein, 8 aa, Homo Sapiens
VVDNPIYL

SEQ ID NO: 143673 - protein, 8 aa, Homo Sapiens
VWDVGSHF

SEQ ID NO: 143674 - protein, 8 aa, Homo Sapiens
VWDYVEKI

SEQ ID NO: 143675 - protein, 8 aa, Homo Sapiens
VYDEFLLL

SEQ ID NO: 143676 - protein, 8 aa, Homo Sapiens
VYDGFSFI

SEQ ID NO: 143677 - protein, 8 aa, Homo Sapiens
VYDHQGIF

SEQ ID NO: 143678 - protein, 8 aa, Homo Sapiens
VYDIAAKF

SEQ ID NO: 143679 - protein, 8 aa, Homo Sapiens
VYDIAKHL

SEQ ID NO: 143680 - protein, 8 aa, Homo Sapiens
VYDIICNL

SEQ ID NO: 143681 - protein, 8 aa, Homo Sapiens
VYDISYLL

SEQ ID NO: 143682 - protein, 8 aa, Homo Sapiens
VYDIVNNL

SEQ ID NO: 143683 - protein, 8 aa, Homo Sapiens
VYDLYKTL

SEQ ID NO: 143684 - protein, 8 aa, Homo Sapiens
VYDNIGIL

SEQ ID NO: 143685 - protein, 8 aa, Homo Sapiens
VYDVAMKL

SEQ ID NO: 143686 - protein, 8 aa, Homo Sapiens
VYDVTLNF

SEQ ID NO: 143687 - protein, 8 aa, Homo Sapiens
VYDVTRFL

SEQ ID NO: 143688 - protein, 8 aa, Homo Sapiens
YADGESFL

SEQ ID NO: 143689 - protein, 8 aa, Homo Sapiens
YFDEHYEY

SEQ ID NO: 143690 - protein, 8 aa, Homo Sapiens
YFDEPVEL

SEQ ID NO: 143691 - protein, 8 aa, Homo Sapiens
YFDLPAGL

SEQ ID NO: 143692 - protein, 8 aa, Homo Sapiens
YFDLPGAL

SEQ ID NO: 143693 - protein, 8 aa, Homo Sapiens
YFDRAALF

SEQ ID NO: 143694 - protein, 8 aa, Homo Sapiens
YFDSYAHF

SEQ ID NO: 143695 - protein, 8 aa, Homo Sapiens
YFDVIEEI

SEQ ID NO: 143696 - protein, 8 aa, Homo Sapiens
YFDVPELI

SEQ ID NO: 143697 - protein, 8 aa, Homo Sapiens
YFDVVEEI

SEQ ID NO: 143698 - protein, 8 aa, Homo Sapiens
YFGEIALL

SEQ ID NO: 143699 - protein, 8 aa, Homo Sapiens
YFMQVAHL

SEQ ID NO: 143700 - protein, 8 aa, Homo Sapiens
YFNAPVYL

SEQ ID NO: 143701 - protein, 8 aa, Homo Sapiens
YLDELVEL

SEQ ID NO: 143702 - protein, 8 aa, Homo Sapiens
YMDTSHLF

SEQ ID NO: 143703 - protein, 8 aa, Homo Sapiens
YTDEAVVI

SEQ ID NO: 143704 - protein, 8 aa, Homo Sapiens
YTDELVEL

SEQ ID NO: 143705 - protein, 8 aa, Homo Sapiens
YTDFHIDF

SEQ ID NO: 143706 - protein, 8 aa, Homo Sapiens
YTDLEVRV

SEQ ID NO: 143707 - protein, 8 aa, Homo Sapiens
YTDNLVRV

SEQ ID NO: 143708 - protein, 8 aa, Homo Sapiens
YYDAIACL

SEQ ID NO: 143709 - protein, 8 aa, Homo Sapiens
YYDFLVEV

SEQ ID NO: 143710 - protein, 8 aa, Homo Sapiens
YYDGMIQL

SEQ ID NO: 143711 - protein, 8 aa, Homo Sapiens
YYDGVAKI

SEQ ID NO: 143712 - protein, 8 aa, Homo Sapiens
YYDIYLKV

SEQ ID NO: 143713 - protein, 8 aa, Homo Sapiens
YYDVAKQL

SEQ ID NO: 143714 - protein, 8 aa, Homo Sapiens
YYEVAGHL

SEQ ID NO: 143715 - protein, 9 aa, Homo Sapiens
AAPIRLLAA

SEQ ID NO: 143716 - protein, 9 aa, Homo Sapiens
AFADSSYLL

SEQ ID NO: 143717 - protein, 9 aa, Homo Sapiens
AFDASRTSF

SEQ ID NO: 143718 - protein, 9 aa, Homo Sapiens
AFDCMKNYL

SEQ ID NO: 143719 - protein, 9 aa, Homo Sapiens
AFDDAIAEL

SEQ ID NO: 143720 - protein, 9 aa, Homo Sapiens
AFDDVVKYF

SEQ ID NO: 143721 - protein, 9 aa, Homo Sapiens
AFDEAIAEL

SEQ ID NO: 143722 - protein, 9 aa, Homo Sapiens
AFDEKLFTF

SEQ ID NO: 143723 - protein, 9 aa, Homo Sapiens
AFDEYGRPF

SEQ ID NO: 143724 - protein, 9 aa, Homo Sapiens
AFDFAAREM

SEQ ID NO: 143725 - protein, 9 aa, Homo Sapiens
AFDFQDVTL

SEQ ID NO: 143726 - protein, 9 aa, Homo Sapiens
AFDHMKVCF

SEQ ID NO: 143727 - protein, 9 aa, Homo Sapiens
AFDIAEELV

SEQ ID NO: 143728 - protein, 9 aa, Homo Sapiens
AFDIAEKEL

SEQ ID NO: 143729 - protein, 9 aa, Homo Sapiens
AFDISKKEM

SEQ ID NO: 143730 - protein, 9 aa, Homo Sapiens
AFDITYVRL

SEQ ID NO: 143731 - protein, 9 aa, Homo Sapiens
AFDKPKVEL

SEQ ID NO: 143732 - protein, 9 aa, Homo Sapiens
AFDLDVVKL

SEQ ID NO: 143733 - protein, 9 aa, Homo Sapiens
AFDLIEHYF

SEQ ID NO: 143734 - protein, 9 aa, Homo Sapiens
AFDLKAAVL

SEQ ID NO: 143735 - protein, 9 aa, Homo Sapiens
AFDLSQVLF

SEQ ID NO: 143736 - protein, 9 aa, Homo Sapiens
AFDLTEQRY

SEQ ID NO: 143737 - protein, 9 aa, Homo Sapiens
AFDLTKTNM

SEQ ID NO: 143738 - protein, 9 aa, Homo Sapiens
AFDLVNIHL

SEQ ID NO: 143739 - protein, 9 aa, Homo Sapiens
AFDLYEQRY

SEQ ID NO: 143740 - protein, 9 aa, Homo Sapiens
AFDNMVTSM

SEQ ID NO: 143741 - protein, 9 aa, Homo Sapiens
AFDNVLNYI

SEQ ID NO: 143742 - protein, 9 aa, Homo Sapiens
AFDPAAAAF

SEQ ID NO: 143743 - protein, 9 aa, Homo Sapiens
AFDPELRIM

SEQ ID NO: 143744 - protein, 9 aa, Homo Sapiens
AFDPTSTLL

SEQ ID NO: 143745 - protein, 9 aa, Homo Sapiens
AFDPVLNRW

SEQ ID NO: 143746 - protein, 9 aa, Homo Sapiens
AFDRKVQFL

SEQ ID NO: 143747 - protein, 9 aa, Homo Sapiens
AFDSSSAVF

SEQ ID NO: 143748 - protein, 9 aa, Homo Sapiens
AFDSTLTHL

SEQ ID NO: 143749 - protein, 9 aa, Homo Sapiens
AFDVAEREF

SEQ ID NO: 143750 - protein, 9 aa, Homo Sapiens
AFDVHLNAF

SEQ ID NO: 143751 - protein, 9 aa, Homo Sapiens
AFDVVERSF

SEQ ID NO: 143752 - protein, 9 aa, Homo Sapiens
AFDYAYVVL

SEQ ID NO: 143753 - protein, 9 aa, Homo Sapiens
AFEDDAIQL

SEQ ID NO: 143754 - protein, 9 aa, Homo Sapiens
AFEDVAVNF

SEQ ID NO: 143755 - protein, 9 aa, Homo Sapiens
AFEDVAVYF

SEQ ID NO: 143756 - protein, 9 aa, Homo Sapiens
AFELHGVFL

SEQ ID NO: 143757 - protein, 9 aa, Homo Sapiens
AFEQLVVEL

SEQ ID NO: 143758 - protein, 9 aa, Homo Sapiens
AFESEPLFL

SEQ ID NO: 143759 - protein, 9 aa, Homo Sapiens
AFGLHLIDF

SEQ ID NO: 143760 - protein, 9 aa, Homo Sapiens
AFIEPPERM

SEQ ID NO: 143761 - protein, 9 aa, Homo Sapiens
AFLESVKKL

SEQ ID NO: 143762 - protein, 9 aa, Homo Sapiens
AFSLAEAKF

SEQ ID NO: 143763 - protein, 9 aa, Homo Sapiens
AFTSDPALL

SEQ ID NO: 143764 - protein, 9 aa, Homo Sapiens
AHDVDPIEL

SEQ ID NO: 143765 - protein, 9 aa, Homo Sapiens
ALDKATVLL

SEQ ID NO: 143766 - protein, 9 aa, Homo Sapiens
ALDVMVSTF

SEQ ID NO: 143767 - protein, 9 aa, Homo Sapiens
AMDLVKNHL

SEQ ID NO: 143768 - protein, 9 aa, Homo Sapiens
AMPGVPAFL

SEQ ID NO: 143769 - protein, 9 aa, Homo Sapiens
ATDEFASYF

SEQ ID NO: 143770 - protein, 9 aa, Homo Sapiens
ATDPFASVF

SEQ ID NO: 143771 - protein, 9 aa, Homo Sapiens
AVDAVIAEL

SEQ ID NO: 143772 - protein, 9 aa, Homo Sapiens
AVDPLLALL

SEQ ID NO: 143773 - protein, 9 aa, Homo Sapiens
AWDEADVRF

SEQ ID NO: 143774 - protein, 9 aa, Homo Sapiens
AWDEVGDEF

SEQ ID NO: 143775 - protein, 9 aa, Homo Sapiens
AWDIAIATM

SEQ ID NO: 143776 - protein, 9 aa, Homo Sapiens
AWDKEPVLV

SEQ ID NO: 143777 - protein, 9 aa, Homo Sapiens
AWDLYYHVF

SEQ ID NO: 143778 - protein, 9 aa, Homo Sapiens
AWDYVQAQV

SEQ ID NO: 143779 - protein, 9 aa, Homo Sapiens
AWEERETIL

SEQ ID NO: 143780 - protein, 9 aa, Homo Sapiens
AWWEWDTKF

SEQ ID NO: 143781 - protein, 9 aa, Homo Sapiens
AYDASLAML

SEQ ID NO: 143782 - protein, 9 aa, Homo Sapiens
AYDDKIYYF

SEQ ID NO: 143783 - protein, 9 aa, Homo Sapiens
AYDDLSPLL

SEQ ID NO: 143784 - protein, 9 aa, Homo Sapiens
AYDFLYNYL

SEQ ID NO: 143785 - protein, 9 aa, Homo Sapiens
AYDHSYVEL

SEQ ID NO: 143786 - protein, 9 aa, Homo Sapiens
AYDKAVASF

SEQ ID NO: 143787 - protein, 9 aa, Homo Sapiens
AYDLAKALL

SEQ ID NO: 143788 - protein, 9 aa, Homo Sapiens
AYDPTAPTL

SEQ ID NO: 143789 - protein, 9 aa, Homo Sapiens
AYDPYLIAM

SEQ ID NO: 143790 - protein, 9 aa, Homo Sapiens
AYDTLPVLI

SEQ ID NO: 143791 - protein, 9 aa, Homo Sapiens
AYDVSSFSF

SEQ ID NO: 143792 - protein, 9 aa, Homo Sapiens
AYDYMCMGF

SEQ ID NO: 143793 - protein, 9 aa, Homo Sapiens
AYEPLASFL

SEQ ID NO: 143794 - protein, 9 aa, Homo Sapiens
CADPRVPWV

SEQ ID NO: 143795 - protein, 9 aa, Homo Sapiens
CFDPKELRI

SEQ ID NO: 143796 - protein, 9 aa, Homo Sapiens
CFDPLLYFF

SEQ ID NO: 143797 - protein, 9 aa, Homo Sapiens
CFDQFVYKL

SEQ ID NO: 143798 - protein, 9 aa, Homo Sapiens
CFDTVTKEL

SEQ ID NO: 143799 - protein, 9 aa, Homo Sapiens
CFDVKDVQM

SEQ ID NO: 143800 - protein, 9 aa, Homo Sapiens
CFDVPTASV

SEQ ID NO: 143801 - protein, 9 aa, Homo Sapiens
CFNLFETGF

SEQ ID NO: 143802 - protein, 9 aa, Homo Sapiens
CFSLQETVF

SEQ ID NO: 143803 - protein, 9 aa, Homo Sapiens
CGDFPHLLV

SEQ ID NO: 143804 - protein, 9 aa, Homo Sapiens
CHDLTLAVL

SEQ ID NO: 143805 - protein, 9 aa, Homo Sapiens
CLDDTTVKF

SEQ ID NO: 143806 - protein, 9 aa, Homo Sapiens
CMDPFIYFF

SEQ ID NO: 143807 - protein, 9 aa, Homo Sapiens
CWDHRPVQI

SEQ ID NO: 143808 - protein, 9 aa, Homo Sapiens
CWQNYLDFH

SEQ ID NO: 143809 - protein, 9 aa, Homo Sapiens
CWQPVIDYI

SEQ ID NO: 143810 - protein, 9 aa, Homo Sapiens
CYDFDVHTM

SEQ ID NO: 143811 - protein, 9 aa, Homo Sapiens
CYDLAELLL

SEQ ID NO: 143812 - protein, 9 aa, Homo Sapiens
CYDLGAAYF

SEQ ID NO: 143813 - protein, 9 aa, Homo Sapiens
DFDGQVVQV

SEQ ID NO: 143814 - protein, 9 aa, Homo Sapiens
DFDLLNNSL

SEQ ID NO: 143815 - protein, 9 aa, Homo Sapiens
DFDLVDALL

SEQ ID NO: 143816 - protein, 9 aa, Homo Sapiens
DFDMTLSRF

SEQ ID NO: 143817 - protein, 9 aa, Homo Sapiens
DFDPALLEF

SEQ ID NO: 143818 - protein, 9 aa, Homo Sapiens
DFDSVSSIM

SEQ ID NO: 143819 - protein, 9 aa, Homo Sapiens
DFDVAVVTF

SEQ ID NO: 143820 - protein, 9 aa, Homo Sapiens
DWDLMERFM

SEQ ID NO: 143821 - protein, 9 aa, Homo Sapiens
DYDPLVVKL

SEQ ID NO: 143822 - protein, 9 aa, Homo Sapiens
DYDPQTVRL

SEQ ID NO: 143823 - protein, 9 aa, Homo Sapiens
DYVDSALLM

SEQ ID NO: 143824 - protein, 9 aa, Homo Sapiens
EFDEVSRIV

SEQ ID NO: 143825 - protein, 9 aa, Homo Sapiens
EFDGTKVFL

SEQ ID NO: 143826 - protein, 9 aa, Homo Sapiens
EFDIFTRLF

SEQ ID NO: 143827 - protein, 9 aa, Homo Sapiens
EFDKLVALL

SEQ ID NO: 143828 - protein, 9 aa, Homo Sapiens
EFDLLDVRF

SEQ ID NO: 143829 - protein, 9 aa, Homo Sapiens
EFDNAGAMM

SEQ ID NO: 143830 - protein, 9 aa, Homo Sapiens
EFDPIPVLI

SEQ ID NO: 143831 - protein, 9 aa, Homo Sapiens
EFDPLLREI

SEQ ID NO: 143832 - protein, 9 aa, Homo Sapiens
EFDPVMVIL

SEQ ID NO: 143833 - protein, 9 aa, Homo Sapiens
EFWLACEEF

SEQ ID NO: 143834 - protein, 9 aa, Homo Sapiens
EGFSLFVKI

SEQ ID NO: 143835 - protein, 9 aa, Homo Sapiens
EIGVLAKAF

SEQ ID NO: 143836 - protein, 9 aa, Homo Sapiens
EISANFEAL

SEQ ID NO: 143837 - protein, 9 aa, Homo Sapiens
EVSPEVVEI

SEQ ID NO: 143838 - protein, 9 aa, Homo Sapiens
EWDPLDVRF

SEQ ID NO: 143839 - protein, 9 aa, Homo Sapiens
EWDQVTVYL

SEQ ID NO: 143840 - protein, 9 aa, Homo Sapiens
EWDVLIAHF

SEQ ID NO: 143841 - protein, 9 aa, Homo Sapiens
EYDNAIITM

SEQ ID NO: 143842 - protein, 9 aa, Homo Sapiens
EYDPVIILI

SEQ ID NO: 143843 - protein, 9 aa, Homo Sapiens
FADFERHFL

SEQ ID NO: 143844 - protein, 9 aa, Homo Sapiens
FADLNLAEF

SEQ ID NO: 143845 - protein, 9 aa, Homo Sapiens
FADPIAANL

SEQ ID NO: 143846 - protein, 9 aa, Homo Sapiens
FFDAAKLMF

SEQ ID NO: 143847 - protein, 9 aa, Homo Sapiens
FFDACEVLL

SEQ ID NO: 143848 - protein, 9 aa, Homo Sapiens
FFDAIFTQL

SEQ ID NO: 143849 - protein, 9 aa, Homo Sapiens
FFDALDHVI

SEQ ID NO: 143850 - protein, 9 aa, Homo Sapiens
FFDAQEVLL

SEQ ID NO: 143851 - protein, 9 aa, Homo Sapiens
FFDDCIEKL

SEQ ID NO: 143852 - protein, 9 aa, Homo Sapiens
FFDDLLVVL

SEQ ID NO: 143853 - protein, 9 aa, Homo Sapiens
FFDDLSDSF

SEQ ID NO: 143854 - protein, 9 aa, Homo Sapiens
FFDEESYSL

SEQ ID NO: 143855 - protein, 9 aa, Homo Sapiens
FFDEGTINF

SEQ ID NO: 143856 - protein, 9 aa, Homo Sapiens
FFDEKLNSL

SEQ ID NO: 143857 - protein, 9 aa, Homo Sapiens
FFDEVVKQM

SEQ ID NO: 143858 - protein, 9 aa, Homo Sapiens
FFDGELTKV

SEQ ID NO: 143859 - protein, 9 aa, Homo Sapiens
FFDHASAAL

SEQ ID NO: 143860 - protein, 9 aa, Homo Sapiens
FFDHCLFTM

SEQ ID NO: 143861 - protein, 9 aa, Homo Sapiens
FFDHQDQVW

SEQ ID NO: 143862 - protein, 9 aa, Homo Sapiens
FFDHSGTLV

SEQ ID NO: 143863 - protein, 9 aa, Homo Sapiens
FFDHSTRIV

SEQ ID NO: 143864 - protein, 9 aa, Homo Sapiens
FFDIPVDNL

SEQ ID NO: 143865 - protein, 9 aa, Homo Sapiens
FFDLNDTKL

SEQ ID NO: 143866 - protein, 9 aa, Homo Sapiens
FFDMAYQGF

SEQ ID NO: 143867 - protein, 9 aa, Homo Sapiens
FFDNISSEL

SEQ ID NO: 143868 - protein, 9 aa, Homo Sapiens
FFDNLVYYI

SEQ ID NO: 143869 - protein, 9 aa, Homo Sapiens
FFDNRPGKL

SEQ ID NO: 143870 - protein, 9 aa, Homo Sapiens
FFDPAIRVL

SEQ ID NO: 143871 - protein, 9 aa, Homo Sapiens
FFDPDTNIV

SEQ ID NO: 143872 - protein, 9 aa, Homo Sapiens
FFDPHQSTF

SEQ ID NO: 143873 - protein, 9 aa, Homo Sapiens
FFDPSLLHL

SEQ ID NO: 143874 - protein, 9 aa, Homo Sapiens
FFDSAYQGF

SEQ ID NO: 143875 - protein, 9 aa, Homo Sapiens
FFDSVQVVF

SEQ ID NO: 143876 - protein, 9 aa, Homo Sapiens
FFDTELENL

SEQ ID NO: 143877 - protein, 9 aa, Homo Sapiens
FFDTNTSVL

SEQ ID NO: 143878 - protein, 9 aa, Homo Sapiens
FFDTSVPLM

SEQ ID NO: 143879 - protein, 9 aa, Homo Sapiens
FFDVLIKSM

SEQ ID NO: 143880 - protein, 9 aa, Homo Sapiens
FFDVTYRHF

SEQ ID NO: 143881 - protein, 9 aa, Homo Sapiens
FFDYSGRDL

SEQ ID NO: 143882 - protein, 9 aa, Homo Sapiens
FFEEHISSV

SEQ ID NO: 143883 - protein, 9 aa, Homo Sapiens
FFEGKCVEL

SEQ ID NO: 143884 - protein, 9 aa, Homo Sapiens
FFEPWVYSF

SEQ ID NO: 143885 - protein, 9 aa, Homo Sapiens
FFEVFDNSM

SEQ ID NO: 143886 - protein, 9 aa, Homo Sapiens
FFEVFTPVF

SEQ ID NO: 143887 - protein, 9 aa, Homo Sapiens
FFEVSPVSF

SEQ ID NO: 143888 - protein, 9 aa, Homo Sapiens
FFGTHETAF

SEQ ID NO: 143889 - protein, 9 aa, Homo Sapiens
FFHLVNSEM

SEQ ID NO: 143890 - protein, 9 aa, Homo Sapiens
FFIPDIEYL

SEQ ID NO: 143891 - protein, 9 aa, Homo Sapiens
FFKELIQEF

SEQ ID NO: 143892 - protein, 9 aa, Homo Sapiens
FFNLTVKEM

SEQ ID NO: 143893 - protein, 9 aa, Homo Sapiens
FFNQHIITF

SEQ ID NO: 143894 - protein, 9 aa, Homo Sapiens
FFNYKVVLL

SEQ ID NO: 143895 - protein, 9 aa, Homo Sapiens
FFPAFITLL

SEQ ID NO: 143896 - protein, 9 aa, Homo Sapiens
FFPEDPVKI

SEQ ID NO: 143897 - protein, 9 aa, Homo Sapiens
FFPFDPCVL

SEQ ID NO: 143898 - protein, 9 aa, Homo Sapiens
FFSEKIYKL

SEQ ID NO: 143899 - protein, 9 aa, Homo Sapiens
FFSEREASF

SEQ ID NO: 143900 - protein, 9 aa, Homo Sapiens
FFSPKVVSL

SEQ ID NO: 143901 - protein, 9 aa, Homo Sapiens
FFVENVSEL

SEQ ID NO: 143902 - protein, 9 aa, Homo Sapiens
FFYTHLINF

SEQ ID NO: 143903 - protein, 9 aa, Homo Sapiens
FHPARPFLL

SEQ ID NO: 143904 - protein, 9 aa, Homo Sapiens
FHYDYIDLL

SEQ ID NO: 143905 - protein, 9 aa, Homo Sapiens
FIDYNLYGM

SEQ ID NO: 143906 - protein, 9 aa, Homo Sapiens
FLDALIVSM

SEQ ID NO: 143907 - protein, 9 aa, Homo Sapiens
FLDDFIACV

SEQ ID NO: 143908 - protein, 9 aa, Homo Sapiens
FLDENVVSF

SEQ ID NO: 143909 - protein, 9 aa, Homo Sapiens
FLDEPTNHL

SEQ ID NO: 143910 - protein, 9 aa, Homo Sapiens
FLDFAPHYF

SEQ ID NO: 143911 - protein, 9 aa, Homo Sapiens
FLDLARNIF

SEQ ID NO: 143912 - protein, 9 aa, Homo Sapiens
FLDLSENLI

SEQ ID NO: 143913 - protein, 9 aa, Homo Sapiens
FLDLSIIRF

SEQ ID NO: 143914 - protein, 9 aa, Homo Sapiens
FLDLSSNQL

SEQ ID NO: 143915 - protein, 9 aa, Homo Sapiens
FLDLTEQEF

SEQ ID NO: 143916 - protein, 9 aa, Homo Sapiens
FLDSEVSEL

SEQ ID NO: 143917 - protein, 9 aa, Homo Sapiens
FLDSQTATF

SEQ ID NO: 143918 - protein, 9 aa, Homo Sapiens
FLDWPQGTF

SEQ ID NO: 143919 - protein, 9 aa, Homo Sapiens
FLPDHPIVL

SEQ ID NO: 143920 - protein, 9 aa, Homo Sapiens
FLPEAPAEL

SEQ ID NO: 143921 - protein, 9 aa, Homo Sapiens
FLPELPADL

SEQ ID NO: 143922 - protein, 9 aa, Homo Sapiens
FLPPFPAHL

SEQ ID NO: 143923 - protein, 9 aa, Homo Sapiens
FLYPFPLAL

SEQ ID NO: 143924 - protein, 9 aa, Homo Sapiens
FMDDKRVYI

SEQ ID NO: 143925 - protein, 9 aa, Homo Sapiens
FMDESTQCF

SEQ ID NO: 143926 - protein, 9 aa, Homo Sapiens
FMDFQMQRM

SEQ ID NO: 143927 - protein, 9 aa, Homo Sapiens
FSEEHPVLL

SEQ ID NO: 143928 - protein, 9 aa, Homo Sapiens
FSPFHASVL

SEQ ID NO: 143929 - protein, 9 aa, Homo Sapiens
FTDEESRVF

SEQ ID NO: 143930 - protein, 9 aa, Homo Sapiens
FTDFDPHHF

SEQ ID NO: 143931 - protein, 9 aa, Homo Sapiens
FTDVIGHYI

SEQ ID NO: 143932 - protein, 9 aa, Homo Sapiens
FTEDHYVEF

SEQ ID NO: 143933 - protein, 9 aa, Homo Sapiens
FTEKEWPLL

SEQ ID NO: 143934 - protein, 9 aa, Homo Sapiens
FVDDYTVRV

SEQ ID NO: 143935 - protein, 9 aa, Homo Sapiens
FWADKVASL

SEQ ID NO: 143936 - protein, 9 aa, Homo Sapiens
FWDDAVKEV

SEQ ID NO: 143937 - protein, 9 aa, Homo Sapiens
FWDGKIVLV

SEQ ID NO: 143938 - protein, 9 aa, Homo Sapiens
FWDKKVTHF

SEQ ID NO: 143939 - protein, 9 aa, Homo Sapiens
FWDPSVNLF

SEQ ID NO: 143940 - protein, 9 aa, Homo Sapiens
FWDYGRIAL

SEQ ID NO: 143941 - protein, 9 aa, Homo Sapiens
FWEQKPLLI

SEQ ID NO: 143942 - protein, 9 aa, Homo Sapiens
FWESSIVYL

SEQ ID NO: 143943 - protein, 9 aa, Homo Sapiens
FWPLIPQFV

SEQ ID NO: 143944 - protein, 9 aa, Homo Sapiens
FWPPYVELL

SEQ ID NO: 143945 - protein, 9 aa, Homo Sapiens
FYDDTYNTL

SEQ ID NO: 143946 - protein, 9 aa, Homo Sapiens
FYDECLRKY

SEQ ID NO: 143947 - protein, 9 aa, Homo Sapiens
FYDERIVVV

SEQ ID NO: 143948 - protein, 9 aa, Homo Sapiens
FYDGIKAIF

SEQ ID NO: 143949 - protein, 9 aa, Homo Sapiens
FYDGIKAIL

SEQ ID NO: 143950 - protein, 9 aa, Homo Sapiens
FYDGVVQTV

SEQ ID NO: 143951 - protein, 9 aa, Homo Sapiens
FYDPDTVEL

SEQ ID NO: 143952 - protein, 9 aa, Homo Sapiens
FYDPDVGNF

SEQ ID NO: 143953 - protein, 9 aa, Homo Sapiens
FYDPRSLDI

SEQ ID NO: 143954 - protein, 9 aa, Homo Sapiens
FYDQRQVLL

SEQ ID NO: 143955 - protein, 9 aa, Homo Sapiens
FYDSELFRM

SEQ ID NO: 143956 - protein, 9 aa, Homo Sapiens
FYDSQGIHF

SEQ ID NO: 143957 - protein, 9 aa, Homo Sapiens
FYDSQPTLI

SEQ ID NO: 143958 - protein, 9 aa, Homo Sapiens
FYDTKVTVM

SEQ ID NO: 143959 - protein, 9 aa, Homo Sapiens
FYDVQFKEL

SEQ ID NO: 143960 - protein, 9 aa, Homo Sapiens
FYDWDNTEL

SEQ ID NO: 143961 - protein, 9 aa, Homo Sapiens
FYEAAIPEM

SEQ ID NO: 143962 - protein, 9 aa, Homo Sapiens
FYEDNVLYM

SEQ ID NO: 143963 - protein, 9 aa, Homo Sapiens
FYEEKEVDL

SEQ ID NO: 143964 - protein, 9 aa, Homo Sapiens
FYEERALYL

SEQ ID NO: 143965 - protein, 9 aa, Homo Sapiens
FYEETKVKF

SEQ ID NO: 143966 - protein, 9 aa, Homo Sapiens
FYESLPPEM

SEQ ID NO: 143967 - protein, 9 aa, Homo Sapiens
FYETLPAEM

SEQ ID NO: 143968 - protein, 9 aa, Homo Sapiens
FYETLPVAI

SEQ ID NO: 143969 - protein, 9 aa, Homo Sapiens
FYEVVDARL

SEQ ID NO: 143970 - protein, 9 aa, Homo Sapiens
FYIESISYL

SEQ ID NO: 143971 - protein, 9 aa, Homo Sapiens
FYNERVVIM

SEQ ID NO: 143972 - protein, 9 aa, Homo Sapiens
FYNTSIEEM

SEQ ID NO: 143973 - protein, 9 aa, Homo Sapiens
FYPEEVSSM

SEQ ID NO: 143974 - protein, 9 aa, Homo Sapiens
FYPPDPAQL

SEQ ID NO: 143975 - protein, 9 aa, Homo Sapiens
FYPPKVELF

SEQ ID NO: 143976 - protein, 9 aa, Homo Sapiens
FYQCEVVRL

SEQ ID NO: 143977 - protein, 9 aa, Homo Sapiens
FYSNKEIFL

SEQ ID NO: 143978 - protein, 9 aa, Homo Sapiens
GFDAVTGEF

SEQ ID NO: 143979 - protein, 9 aa, Homo Sapiens
GFDERVTVM

SEQ ID NO: 143980 - protein, 9 aa, Homo Sapiens
GFDFSGAEI

SEQ ID NO: 143981 - protein, 9 aa, Homo Sapiens
GFDHHVVRV

SEQ ID NO: 143982 - protein, 9 aa, Homo Sapiens
GFDLQETLV

SEQ ID NO: 143983 - protein, 9 aa, Homo Sapiens
GFDLSEEKF

SEQ ID NO: 143984 - protein, 9 aa, Homo Sapiens
GMDVAASEF

SEQ ID NO: 143985 - protein, 9 aa, Homo Sapiens
GWDEALLTM

SEQ ID NO: 143986 - protein, 9 aa, Homo Sapiens
GWDVAELQL

SEQ ID NO: 143987 - protein, 9 aa, Homo Sapiens
GYDTRVTIL

SEQ ID NO: 143988 - protein, 9 aa, Homo Sapiens
GYDTRVTVL

SEQ ID NO: 143989 - protein, 9 aa, Homo Sapiens
HFDADGNYF

SEQ ID NO: 143990 - protein, 9 aa, Homo Sapiens
HFDASHVAL

SEQ ID NO: 143991 - protein, 9 aa, Homo Sapiens
HFDASLSTY

SEQ ID NO: 143992 - protein, 9 aa, Homo Sapiens
HFDDFVTNL

SEQ ID NO: 143993 - protein, 9 aa, Homo Sapiens
HFDDIGPSV

SEQ ID NO: 143994 - protein, 9 aa, Homo Sapiens
HFDDTVVCL

SEQ ID NO: 143995 - protein, 9 aa, Homo Sapiens
HFDETVNRY

SEQ ID NO: 143996 - protein, 9 aa, Homo Sapiens
HFDFIQSHI

SEQ ID NO: 143997 - protein, 9 aa, Homo Sapiens
HFDFQGCNF

SEQ ID NO: 143998 - protein, 9 aa, Homo Sapiens
HFDGFVVEV

SEQ ID NO: 143999 - protein, 9 aa, Homo Sapiens
HFDIVIRNL

SEQ ID NO: 144000 - protein, 9 aa, Homo Sapiens
HFDLASTTI

SEQ ID NO: 144001 - protein, 9 aa, Homo Sapiens
HFDLFLRFL

SEQ ID NO: 144002 - protein, 9 aa, Homo Sapiens
HFDLHEEML

SEQ ID NO: 144003 - protein, 9 aa, Homo Sapiens
HFDLLHEDV

SEQ ID NO: 144004 - protein, 9 aa, Homo Sapiens
HFDLNLRQF

SEQ ID NO: 144005 - protein, 9 aa, Homo Sapiens
HFDLSHGSA

SEQ ID NO: 144006 - protein, 9 aa, Homo Sapiens
HFDLSVIEL

SEQ ID NO: 144007 - protein, 9 aa, Homo Sapiens
HFDMNIISM

SEQ ID NO: 144008 - protein, 9 aa, Homo Sapiens
HFDNLFSKM

SEQ ID NO: 144009 - protein, 9 aa, Homo Sapiens
HFDPEAPFL

SEQ ID NO: 144010 - protein, 9 aa, Homo Sapiens
HFDPEVVQI

SEQ ID NO: 144011 - protein, 9 aa, Homo Sapiens
HFDQMFQRF

SEQ ID NO: 144012 - protein, 9 aa, Homo Sapiens
HFDSPPHLL

SEQ ID NO: 144013 - protein, 9 aa, Homo Sapiens
HFDSRSVIF

SEQ ID NO: 144014 - protein, 9 aa, Homo Sapiens
HFDSYITCV

SEQ ID NO: 144015 - protein, 9 aa, Homo Sapiens
HFDTIFEVF

SEQ ID NO: 144016 - protein, 9 aa, Homo Sapiens
HFDTPPHLF

SEQ ID NO: 144017 - protein, 9 aa, Homo Sapiens
HFDTPVQFL

SEQ ID NO: 144018 - protein, 9 aa, Homo Sapiens
HFDVQSMLF

SEQ ID NO: 144019 - protein, 9 aa, Homo Sapiens
HFDVVKCIL

SEQ ID NO: 144020 - protein, 9 aa, Homo Sapiens
HFDVVQLLV

SEQ ID NO: 144021 - protein, 9 aa, Homo Sapiens
HFDYQSLLM

SEQ ID NO: 144022 - protein, 9 aa, Homo Sapiens
HFDYSPAGL

SEQ ID NO: 144023 - protein, 9 aa, Homo Sapiens
HFEELETIM

SEQ ID NO: 144024 - protein, 9 aa, Homo Sapiens
HFHPSVALF

SEQ ID NO: 144025 - protein, 9 aa, Homo Sapiens
HFITPVSTL

SEQ ID NO: 144026 - protein, 9 aa, Homo Sapiens
HFNPTGSAF

SEQ ID NO: 144027 - protein, 9 aa, Homo Sapiens
HFNVTNTTF

SEQ ID NO: 144028 - protein, 9 aa, Homo Sapiens
HFPDMEIFL

SEQ ID NO: 144029 - protein, 9 aa, Homo Sapiens
HFPGLASEL

SEQ ID NO: 144030 - protein, 9 aa, Homo Sapiens
HFSELLDEF

SEQ ID NO: 144031 - protein, 9 aa, Homo Sapiens
HFSEQLLNL

SEQ ID NO: 144032 - protein, 9 aa, Homo Sapiens
HFWTWINHL

SEQ ID NO: 144033 - protein, 9 aa, Homo Sapiens
HFYEHLNQM

SEQ ID NO: 144034 - protein, 9 aa, Homo Sapiens
HFYYFVKEF

SEQ ID NO: 144035 - protein, 9 aa, Homo Sapiens
HGLIRKYGL

SEQ ID NO: 144036 - protein, 9 aa, Homo Sapiens
HIDVITAEM

SEQ ID NO: 144037 - protein, 9 aa, Homo Sapiens
HIIAGAGEL

SEQ ID NO: 144038 - protein, 9 aa, Homo Sapiens
HLDLIEAKF

SEQ ID NO: 144039 - protein, 9 aa, Homo Sapiens
HLDPGPIYM

SEQ ID NO: 144040 - protein, 9 aa, Homo Sapiens
HLPNKACFL

SEQ ID NO: 144041 - protein, 9 aa, Homo Sapiens
HLPPFFDCL

SEQ ID NO: 144042 - protein, 9 aa, Homo Sapiens
HMDTFIETF

SEQ ID NO: 144043 - protein, 9 aa, Homo Sapiens
HTDLPVSVF

SEQ ID NO: 144044 - protein, 9 aa, Homo Sapiens
HWDGNMSLV

SEQ ID NO: 144045 - protein, 9 aa, Homo Sapiens
HWDPDILCL

SEQ ID NO: 144046 - protein, 9 aa, Homo Sapiens
HWDPQEVTL

SEQ ID NO: 144047 - protein, 9 aa, Homo Sapiens
HWDVTEAVF

SEQ ID NO: 144048 - protein, 9 aa, Homo Sapiens
HWDWKIALL

SEQ ID NO: 144049 - protein, 9 aa, Homo Sapiens
HWFVWVTQM

SEQ ID NO: 144050 - protein, 9 aa, Homo Sapiens
HWVDLLDRF

SEQ ID NO: 144051 - protein, 9 aa, Homo Sapiens
HYDAICQYM

SEQ ID NO: 144052 - protein, 9 aa, Homo Sapiens
HYDAVEAEL

SEQ ID NO: 144053 - protein, 9 aa, Homo Sapiens
HYDCVQILL

SEQ ID NO: 144054 - protein, 9 aa, Homo Sapiens
HYDEQQNFF

SEQ ID NO: 144055 - protein, 9 aa, Homo Sapiens
HYDHVLIEL

SEQ ID NO: 144056 - protein, 9 aa, Homo Sapiens
HYDIPKISM

SEQ ID NO: 144057 - protein, 9 aa, Homo Sapiens
HYDLAFTDV

SEQ ID NO: 144058 - protein, 9 aa, Homo Sapiens
HYDLFIERF

SEQ ID NO: 144059 - protein, 9 aa, Homo Sapiens
HYDMNTASL

SEQ ID NO: 144060 - protein, 9 aa, Homo Sapiens
HYDPAELKL

SEQ ID NO: 144061 - protein, 9 aa, Homo Sapiens
HYDPATEEF

SEQ ID NO: 144062 - protein, 9 aa, Homo Sapiens
HYDPDYEFL

SEQ ID NO: 144063 - protein, 9 aa, Homo Sapiens
HYDPMIAKL

SEQ ID NO: 144064 - protein, 9 aa, Homo Sapiens
HYDRFVIFL

SEQ ID NO: 144065 - protein, 9 aa, Homo Sapiens
HYDVQSILF

SEQ ID NO: 144066 - protein, 9 aa, Homo Sapiens
HYEGAVVIL

SEQ ID NO: 144067 - protein, 9 aa, Homo Sapiens
HYIYPPAIV

SEQ ID NO: 144068 - protein, 9 aa, Homo Sapiens
HYWTWINHF

SEQ ID NO: 144069 - protein, 9 aa, Homo Sapiens
IADGLPVAV

SEQ ID NO: 144070 - protein, 9 aa, Homo Sapiens
IADLVVAVF

SEQ ID NO: 144071 - protein, 9 aa, Homo Sapiens
IADPNIAKL

SEQ ID NO: 144072 - protein, 9 aa, Homo Sapiens
IAPGVTHEL

SEQ ID NO: 144073 - protein, 9 aa, Homo Sapiens
ICDELIAKL

SEQ ID NO: 144074 - protein, 9 aa, Homo Sapiens
IFAPYVDIF

SEQ ID NO: 144075 - protein, 9 aa, Homo Sapiens
IFCESLRNF

SEQ ID NO: 144076 - protein, 9 aa, Homo Sapiens
IFDANESGF

SEQ ID NO: 144077 - protein, 9 aa, Homo Sapiens
IFDAVGFTF

SEQ ID NO: 144078 - protein, 9 aa, Homo Sapiens
IFDAVLKGV

SEQ ID NO: 144079 - protein, 9 aa, Homo Sapiens
IFDCVSQEY

SEQ ID NO: 144080 - protein, 9 aa, Homo Sapiens
IFDDPLNAF

SEQ ID NO: 144081 - protein, 9 aa, Homo Sapiens
IFDEAALEV

SEQ ID NO: 144082 - protein, 9 aa, Homo Sapiens
IFDEFRTVL

SEQ ID NO: 144083 - protein, 9 aa, Homo Sapiens
IFDEILVNA

SEQ ID NO: 144084 - protein, 9 aa, Homo Sapiens
IFDEMKKKF

SEQ ID NO: 144085 - protein, 9 aa, Homo Sapiens
IFDEVMGCF

SEQ ID NO: 144086 - protein, 9 aa, Homo Sapiens
IFDGFIVSL

SEQ ID NO: 144087 - protein, 9 aa, Homo Sapiens
IFDGLLEYL

SEQ ID NO: 144088 - protein, 9 aa, Homo Sapiens
IFDGNVAHI

SEQ ID NO: 144089 - protein, 9 aa, Homo Sapiens
IFDIIDREA

SEQ ID NO: 144090 - protein, 9 aa, Homo Sapiens
IFDIPGRLY

SEQ ID NO: 144091 - protein, 9 aa, Homo Sapiens
IFDKIHSLL

SEQ ID NO: 144092 - protein, 9 aa, Homo Sapiens
IFDLFLECM

SEQ ID NO: 144093 - protein, 9 aa, Homo Sapiens
IFDLGGGTF

SEQ ID NO: 144094 - protein, 9 aa, Homo Sapiens
IFDLMDAKA

SEQ ID NO: 144095 - protein, 9 aa, Homo Sapiens
IFDLPRTNI

SEQ ID NO: 144096 - protein, 9 aa, Homo Sapiens
IFDLQKTSL

SEQ ID NO: 144097 - protein, 9 aa, Homo Sapiens
IFDLQNKVL

SEQ ID NO: 144098 - protein, 9 aa, Homo Sapiens
IFDLSCMGF

SEQ ID NO: 144099 - protein, 9 aa, Homo Sapiens
IFDNCHELY

SEQ ID NO: 144100 - protein, 9 aa, Homo Sapiens
IFDNSDNRL

SEQ ID NO: 144101 - protein, 9 aa, Homo Sapiens
IFDNTFSRF

SEQ ID NO: 144102 - protein, 9 aa, Homo Sapiens
IFDNWIPLL

SEQ ID NO: 144103 - protein, 9 aa, Homo Sapiens
IFDPLEIIL

SEQ ID NO: 144104 - protein, 9 aa, Homo Sapiens
IFDPNILTI

SEQ ID NO: 144105 - protein, 9 aa, Homo Sapiens
IFDPSPEDI

SEQ ID NO: 144106 - protein, 9 aa, Homo Sapiens
IFDPTRECM

SEQ ID NO: 144107 - protein, 9 aa, Homo Sapiens
IFDPVKQQF

SEQ ID NO: 144108 - protein, 9 aa, Homo Sapiens
IFDQSGTYL

SEQ ID NO: 144109 - protein, 9 aa, Homo Sapiens
IFDRAVAAY

SEQ ID NO: 144110 - protein, 9 aa, Homo Sapiens
IFDRVLTEL

SEQ ID NO: 144111 - protein, 9 aa, Homo Sapiens
IFDSIIVTL

SEQ ID NO: 144112 - protein, 9 aa, Homo Sapiens
IFDSKTVSI

SEQ ID NO: 144113 - protein, 9 aa, Homo Sapiens
IFDSKVTEI

SEQ ID NO: 144114 - protein, 9 aa, Homo Sapiens
IFDSSDLSF

SEQ ID NO: 144115 - protein, 9 aa, Homo Sapiens
IFDSTAVLL

SEQ ID NO: 144116 - protein, 9 aa, Homo Sapiens
IFDVASIIL

SEQ ID NO: 144117 - protein, 9 aa, Homo Sapiens
IFDVHVHEV

SEQ ID NO: 144118 - protein, 9 aa, Homo Sapiens
IFDVLPNFF

SEQ ID NO: 144119 - protein, 9 aa, Homo Sapiens
IFDWLGRSL

SEQ ID NO: 144120 - protein, 9 aa, Homo Sapiens
IFDWVEANL

SEQ ID NO: 144121 - protein, 9 aa, Homo Sapiens
IFEDKTVKL

SEQ ID NO: 144122 - protein, 9 aa, Homo Sapiens
IFEVADTHL

SEQ ID NO: 144123 - protein, 9 aa, Homo Sapiens
IFHHFAPLL

SEQ ID NO: 144124 - protein, 9 aa, Homo Sapiens
IFMEDTACF

SEQ ID NO: 144125 - protein, 9 aa, Homo Sapiens
IFMLCTLVL

SEQ ID NO: 144126 - protein, 9 aa, Homo Sapiens
IFPEPVAFL

SEQ ID NO: 144127 - protein, 9 aa, Homo Sapiens
IFPNQTEEL

SEQ ID NO: 144128 - protein, 9 aa, Homo Sapiens
IFSEKPVFV

SEQ ID NO: 144129 - protein, 9 aa, Homo Sapiens
IFSPNVVNL

SEQ ID NO: 144130 - protein, 9 aa, Homo Sapiens
IFSPSVEDF

SEQ ID NO: 144131 - protein, 9 aa, Homo Sapiens
IFTPIVEHL

SEQ ID NO: 144132 - protein, 9 aa, Homo Sapiens
IFWFFREAF

SEQ ID NO: 144133 - protein, 9 aa, Homo Sapiens
IHDGLTVHL

SEQ ID NO: 144134 - protein, 9 aa, Homo Sapiens
IHDLLTIFV

SEQ ID NO: 144135 - protein, 9 aa, Homo Sapiens
IIDEQPLIF

SEQ ID NO: 144136 - protein, 9 aa, Homo Sapiens
ILDCQFSEF

SEQ ID NO: 144137 - protein, 9 aa, Homo Sapiens
ILDDTVQRF

SEQ ID NO: 144138 - protein, 9 aa, Homo Sapiens
ILDLVISCF

SEQ ID NO: 144139 - protein, 9 aa, Homo Sapiens
ILDNPVVQL

SEQ ID NO: 144140 - protein, 9 aa, Homo Sapiens
ILDNSPAFL

SEQ ID NO: 144141 - protein, 9 aa, Homo Sapiens
ILDPCIYRV

SEQ ID NO: 144142 - protein, 9 aa, Homo Sapiens
ILDPHVVLL

SEQ ID NO: 144143 - protein, 9 aa, Homo Sapiens
ILDRHLAIL

SEQ ID NO: 144144 - protein, 9 aa, Homo Sapiens
ILDVASLEV

SEQ ID NO: 144145 - protein, 9 aa, Homo Sapiens
ILDVIVRSF

SEQ ID NO: 144146 - protein, 9 aa, Homo Sapiens
ILPEYADIF

SEQ ID NO: 144147 - protein, 9 aa, Homo Sapiens
ILPGFIDFI

SEQ ID NO: 144148 - protein, 9 aa, Homo Sapiens
IMDATNILV

SEQ ID NO: 144149 - protein, 9 aa, Homo Sapiens
IMDVSLRSF

SEQ ID NO: 144150 - protein, 9 aa, Homo Sapiens
ISDEGIAYL

SEQ ID NO: 144151 - protein, 9 aa, Homo Sapiens
ISDHYPVEV

SEQ ID NO: 144152 - protein, 9 aa, Homo Sapiens
ITDFHPDTW

SEQ ID NO: 144153 - protein, 9 aa, Homo Sapiens
ITDHLIAML

SEQ ID NO: 144154 - protein, 9 aa, Homo Sapiens
ITDPDVVHI

SEQ ID NO: 144155 - protein, 9 aa, Homo Sapiens
ITDPEVVFV

SEQ ID NO: 144156 - protein, 9 aa, Homo Sapiens
ITDPRTVFV

SEQ ID NO: 144157 - protein, 9 aa, Homo Sapiens
ITDPSVIVM

SEQ ID NO: 144158 - protein, 9 aa, Homo Sapiens
ITDVQLAIF

SEQ ID NO: 144159 - protein, 9 aa, Homo Sapiens
ITSMLNPLI

SEQ ID NO: 144160 - protein, 9 aa, Homo Sapiens
IVDEAIYYF

SEQ ID NO: 144161 - protein, 9 aa, Homo Sapiens
IVDGAVVKF

SEQ ID NO: 144162 - protein, 9 aa, Homo Sapiens
IVDGRVYYI

SEQ ID NO: 144163 - protein, 9 aa, Homo Sapiens
IVDLPVHQL

SEQ ID NO: 144164 - protein, 9 aa, Homo Sapiens
IWDETPLYF

SEQ ID NO: 144165 - protein, 9 aa, Homo Sapiens
IWDFVSGSF

SEQ ID NO: 144166 - protein, 9 aa, Homo Sapiens
IWDLLKNAI

SEQ ID NO: 144167 - protein, 9 aa, Homo Sapiens
IWDLTTATL

SEQ ID NO: 144168 - protein, 9 aa, Homo Sapiens
IWDMGLELF

SEQ ID NO: 144169 - protein, 9 aa, Homo Sapiens
IWDPVLSVM

SEQ ID NO: 144170 - protein, 9 aa, Homo Sapiens
IWDRAITTL

SEQ ID NO: 144171 - protein, 9 aa, Homo Sapiens
IWDVSVNSV

SEQ ID NO: 144172 - protein, 9 aa, Homo Sapiens
IWDVTILEY

SEQ ID NO: 144173 - protein, 9 aa, Homo Sapiens
IWDWKTTKL

SEQ ID NO: 144174 - protein, 9 aa, Homo Sapiens
IWDYHVVLL

SEQ ID NO: 144175 - protein, 9 aa, Homo Sapiens
IWEEWPLLI

SEQ ID NO: 144176 - protein, 9 aa, Homo Sapiens
IWEPLAVKL

SEQ ID NO: 144177 - protein, 9 aa, Homo Sapiens
IWEQYTVTL

SEQ ID NO: 144178 - protein, 9 aa, Homo Sapiens
IWPLHPSLL

SEQ ID NO: 144179 - protein, 9 aa, Homo Sapiens
IWQAYLDYL

SEQ ID NO: 144180 - protein, 9 aa, Homo Sapiens
IYDDCIVTV

SEQ ID NO: 144181 - protein, 9 aa, Homo Sapiens
IYDDGITSL

SEQ ID NO: 144182 - protein, 9 aa, Homo Sapiens
IYDEAISSF

SEQ ID NO: 144183 - protein, 9 aa, Homo Sapiens
IYDEDEVLL

SEQ ID NO: 144184 - protein, 9 aa, Homo Sapiens
IYDEVVKLL

SEQ ID NO: 144185 - protein, 9 aa, Homo Sapiens
IYDFIGEFM

SEQ ID NO: 144186 - protein, 9 aa, Homo Sapiens
IYDFTDTVI

SEQ ID NO: 144187 - protein, 9 aa, Homo Sapiens
IYDIAWCQL

SEQ ID NO: 144188 - protein, 9 aa, Homo Sapiens
IYDICRRNL

SEQ ID NO: 144189 - protein, 9 aa, Homo Sapiens
IYDIMNELM

SEQ ID NO: 144190 - protein, 9 aa, Homo Sapiens
IYDIVRNSW

SEQ ID NO: 144191 - protein, 9 aa, Homo Sapiens
IYDKCITEL

SEQ ID NO: 144192 - protein, 9 aa, Homo Sapiens
IYDKFIAQL

SEQ ID NO: 144193 - protein, 9 aa, Homo Sapiens
IYDKTSVLF

SEQ ID NO: 144194 - protein, 9 aa, Homo Sapiens
IYDLATQTL

SEQ ID NO: 144195 - protein, 9 aa, Homo Sapiens
IYDLFQKSF

SEQ ID NO: 144196 - protein, 9 aa, Homo Sapiens
IYDLHESTY

SEQ ID NO: 144197 - protein, 9 aa, Homo Sapiens
IYDLLDTAM

SEQ ID NO: 144198 - protein, 9 aa, Homo Sapiens
IYDLVDRHL

SEQ ID NO: 144199 - protein, 9 aa, Homo Sapiens
IYDNAVQGL

SEQ ID NO: 144200 - protein, 9 aa, Homo Sapiens
IYDNQGIEL

SEQ ID NO: 144201 - protein, 9 aa, Homo Sapiens
IYDPNLAFL

SEQ ID NO: 144202 - protein, 9 aa, Homo Sapiens
IYDSVKVYF

SEQ ID NO: 144203 - protein, 9 aa, Homo Sapiens
IYDVNKNEW

SEQ ID NO: 144204 - protein, 9 aa, Homo Sapiens
IYDVQHANL

SEQ ID NO: 144205 - protein, 9 aa, Homo Sapiens
IYEEFLAAF

SEQ ID NO: 144206 - protein, 9 aa, Homo Sapiens
IYELAVASF

SEQ ID NO: 144207 - protein, 9 aa, Homo Sapiens
IYELMQTEF

SEQ ID NO: 144208 - protein, 9 aa, Homo Sapiens
IYEQKIAEL

SEQ ID NO: 144209 - protein, 9 aa, Homo Sapiens
IYEYVESRM

SEQ ID NO: 144210 - protein, 9 aa, Homo Sapiens
IYSSLPVEV

SEQ ID NO: 144211 - protein, 9 aa, Homo Sapiens
KADGVPVYL

SEQ ID NO: 144212 - protein, 9 aa, Homo Sapiens
KADSVVVLL

SEQ ID NO: 144213 - protein, 9 aa, Homo Sapiens
KAPEPLSSL

SEQ ID NO: 144214 - protein, 9 aa, Homo Sapiens
KFDADPVEL

SEQ ID NO: 144215 - protein, 9 aa, Homo Sapiens
KFDAELLEI

SEQ ID NO: 144216 - protein, 9 aa, Homo Sapiens
KFDALITTF

SEQ ID NO: 144217 - protein, 9 aa, Homo Sapiens
KFDDGAVFL

SEQ ID NO: 144218 - protein, 9 aa, Homo Sapiens
KFDDIRIYF

SEQ ID NO: 144219 - protein, 9 aa, Homo Sapiens
KFDFPVSYL

SEQ ID NO: 144220 - protein, 9 aa, Homo Sapiens
KFDIYTIAF

SEQ ID NO: 144221 - protein, 9 aa, Homo Sapiens
KFDLAARTL

SEQ ID NO: 144222 - protein, 9 aa, Homo Sapiens
KFDPMGKYF

SEQ ID NO: 144223 - protein, 9 aa, Homo Sapiens
KFDPVGEIL

SEQ ID NO: 144224 - protein, 9 aa, Homo Sapiens
KFDQVTVFL

SEQ ID NO: 144225 - protein, 9 aa, Homo Sapiens
KFDVQWIFV

SEQ ID NO: 144226 - protein, 9 aa, Homo Sapiens
KFDVSPVKI

SEQ ID NO: 144227 - protein, 9 aa, Homo Sapiens
KFDVTQCMF

SEQ ID NO: 144228 - protein, 9 aa, Homo Sapiens
KFDYVMQFL

SEQ ID NO: 144229 - protein, 9 aa, Homo Sapiens
KFEEWCIEM

SEQ ID NO: 144230 - protein, 9 aa, Homo Sapiens
KFPSPPAFI

SEQ ID NO: 144231 - protein, 9 aa, Homo Sapiens
KFPVKPADL

SEQ ID NO: 144232 - protein, 9 aa, Homo Sapiens
KFWDYLHEI

SEQ ID NO: 144233 - protein, 9 aa, Homo Sapiens
KFWDYLQEF

SEQ ID NO: 144234 - protein, 9 aa, Homo Sapiens
KFWQFLETV

SEQ ID NO: 144235 - protein, 9 aa, Homo Sapiens
KIEDYFPEF

SEQ ID NO: 144236 - protein, 9 aa, Homo Sapiens
KIVKWDRDM

SEQ ID NO: 144237 - protein, 9 aa, Homo Sapiens
KLDVALKEM

SEQ ID NO: 144238 - protein, 9 aa, Homo Sapiens
KLPGNISSL

SEQ ID NO: 144239 - protein, 9 aa, Homo Sapiens
KMDFTAARL

SEQ ID NO: 144240 - protein, 9 aa, Homo Sapiens
KSDPSIVRL

SEQ ID NO: 144241 - protein, 9 aa, Homo Sapiens
KTDVTVVRF

SEQ ID NO: 144242 - protein, 9 aa, Homo Sapiens
KWDALVIKL

SEQ ID NO: 144243 - protein, 9 aa, Homo Sapiens
KWDPTGNLL

SEQ ID NO: 144244 - protein, 9 aa, Homo Sapiens
KWPDRITLL

SEQ ID NO: 144245 - protein, 9 aa, Homo Sapiens
KWPETPLLL

SEQ ID NO: 144246 - protein, 9 aa, Homo Sapiens
KWSWYLDYL

SEQ ID NO: 144247 - protein, 9 aa, Homo Sapiens
KYDATMIEI

SEQ ID NO: 144248 - protein, 9 aa, Homo Sapiens
KYDLAIKDL

SEQ ID NO: 144249 - protein, 9 aa, Homo Sapiens
KYDNMAELF

SEQ ID NO: 144250 - protein, 9 aa, Homo Sapiens
KYDPNVYSI

SEQ ID NO: 144251 - protein, 9 aa, Homo Sapiens
KYDPSYIEF

SEQ ID NO: 144252 - protein, 9 aa, Homo Sapiens
KYDQLKVYL

SEQ ID NO: 144253 - protein, 9 aa, Homo Sapiens
KYDTALNLL

SEQ ID NO: 144254 - protein, 9 aa, Homo Sapiens
KYDYVGRLL

SEQ ID NO: 144255 - protein, 9 aa, Homo Sapiens
KYEDGIALL

SEQ ID NO: 144256 - protein, 9 aa, Homo Sapiens
KYFLWEEKF

SEQ ID NO: 144257 - protein, 9 aa, Homo Sapiens
KYFLWVVKF

SEQ ID NO: 144258 - protein, 9 aa, Homo Sapiens
LELFPAPIL

SEQ ID NO: 144259 - protein, 9 aa, Homo Sapiens
LFDAETVAL

SEQ ID NO: 144260 - protein, 9 aa, Homo Sapiens
LFDAFHAGF

SEQ ID NO: 144261 - protein, 9 aa, Homo Sapiens
LFDAFVSVL

SEQ ID NO: 144262 - protein, 9 aa, Homo Sapiens
LFDAISIAV

SEQ ID NO: 144263 - protein, 9 aa, Homo Sapiens
LFDANKAEL

SEQ ID NO: 144264 - protein, 9 aa, Homo Sapiens
LFDARTSLV

SEQ ID NO: 144265 - protein, 9 aa, Homo Sapiens
LFDASPTFF

SEQ ID NO: 144266 - protein, 9 aa, Homo Sapiens
LFDATLTQY

SEQ ID NO: 144267 - protein, 9 aa, Homo Sapiens
LFDAVSSLI

SEQ ID NO: 144268 - protein, 9 aa, Homo Sapiens
LFDCYVVVM

SEQ ID NO: 144269 - protein, 9 aa, Homo Sapiens
LFDDCTQQF

SEQ ID NO: 144270 - protein, 9 aa, Homo Sapiens
LFDDIDHNM

SEQ ID NO: 144271 - protein, 9 aa, Homo Sapiens
LFDDKAVEI

SEQ ID NO: 144272 - protein, 9 aa, Homo Sapiens
LFDDSEVKV

SEQ ID NO: 144273 - protein, 9 aa, Homo Sapiens
LFDEIDQAL

SEQ ID NO: 144274 - protein, 9 aa, Homo Sapiens
LFDEIRMTY

SEQ ID NO: 144275 - protein, 9 aa, Homo Sapiens
LFDGAEVVL

SEQ ID NO: 144276 - protein, 9 aa, Homo Sapiens
LFDGSPTYV

SEQ ID NO: 144277 - protein, 9 aa, Homo Sapiens
LFDHAVSKF

SEQ ID NO: 144278 - protein, 9 aa, Homo Sapiens
LFDHIAECL

SEQ ID NO: 144279 - protein, 9 aa, Homo Sapiens
LFDHVAECL

SEQ ID NO: 144280 - protein, 9 aa, Homo Sapiens
LFDHVTVRI

SEQ ID NO: 144281 - protein, 9 aa, Homo Sapiens
LFDHVVNRV

SEQ ID NO: 144282 - protein, 9 aa, Homo Sapiens
LFDIFLETV

SEQ ID NO: 144283 - protein, 9 aa, Homo Sapiens
LFDIFSQQV

SEQ ID NO: 144284 - protein, 9 aa, Homo Sapiens
LFDITGQDF

SEQ ID NO: 144285 - protein, 9 aa, Homo Sapiens
LFDKSINEF

SEQ ID NO: 144286 - protein, 9 aa, Homo Sapiens
LFDLAGITC

SEQ ID NO: 144287 - protein, 9 aa, Homo Sapiens
LFDLALRGL

SEQ ID NO: 144288 - protein, 9 aa, Homo Sapiens
LFDLCDRTF

SEQ ID NO: 144289 - protein, 9 aa, Homo Sapiens
LFDLFRGFF

SEQ ID NO: 144290 - protein, 9 aa, Homo Sapiens
LFDLGGQYL

SEQ ID NO: 144291 - protein, 9 aa, Homo Sapiens
LFDLIQSEL

SEQ ID NO: 144292 - protein, 9 aa, Homo Sapiens
LFDLPPALL

SEQ ID NO: 144293 - protein, 9 aa, Homo Sapiens
LFDLTPAKV

SEQ ID NO: 144294 - protein, 9 aa, Homo Sapiens
LFDLVCHEF

SEQ ID NO: 144295 - protein, 9 aa, Homo Sapiens
LFDLVCRTL

SEQ ID NO: 144296 - protein, 9 aa, Homo Sapiens
LFDNLIEFL

SEQ ID NO: 144297 - protein, 9 aa, Homo Sapiens
LFDPINLVF

SEQ ID NO: 144298 - protein, 9 aa, Homo Sapiens
LFDPMTGTF

SEQ ID NO: 144299 - protein, 9 aa, Homo Sapiens
LFDSLSQML

SEQ ID NO: 144300 - protein, 9 aa, Homo Sapiens
LFDSTLTAF

SEQ ID NO: 144301 - protein, 9 aa, Homo Sapiens
LFDTKPLIV

SEQ ID NO: 144302 - protein, 9 aa, Homo Sapiens
LFDTLVNFF

SEQ ID NO: 144303 - protein, 9 aa, Homo Sapiens
LFDTTNQLF

SEQ ID NO: 144304 - protein, 9 aa, Homo Sapiens
LFDVLHEPF

SEQ ID NO: 144305 - protein, 9 aa, Homo Sapiens
LFDVPVLNL

SEQ ID NO: 144306 - protein, 9 aa, Homo Sapiens
LFDVQILNY

SEQ ID NO: 144307 - protein, 9 aa, Homo Sapiens
LFDVQRNNI

SEQ ID NO: 144308 - protein, 9 aa, Homo Sapiens
LFDVSIMAV

SEQ ID NO: 144309 - protein, 9 aa, Homo Sapiens
LFDYTDTLV

SEQ ID NO: 144310 - protein, 9 aa, Homo Sapiens
LFEEAFAIF

SEQ ID NO: 144311 - protein, 9 aa, Homo Sapiens
LFEEVISKM

SEQ ID NO: 144312 - protein, 9 aa, Homo Sapiens
LFELNTPEF

SEQ ID NO: 144313 - protein, 9 aa, Homo Sapiens
LFEVISHSF

SEQ ID NO: 144314 - protein, 9 aa, Homo Sapiens
LFPEWPSYL

SEQ ID NO: 144315 - protein, 9 aa, Homo Sapiens
LFPGQVVIM

SEQ ID NO: 144316 - protein, 9 aa, Homo Sapiens
LFPLWPAEM

SEQ ID NO: 144317 - protein, 9 aa, Homo Sapiens
LFSSPPVIL

SEQ ID NO: 144318 - protein, 9 aa, Homo Sapiens
LHYPIDSLT

SEQ ID NO: 144319 - protein, 9 aa, Homo Sapiens
LLDEVLNVM

SEQ ID NO: 144320 - protein, 9 aa, Homo Sapiens
LLDGGVINL

SEQ ID NO: 144321 - protein, 9 aa, Homo Sapiens
LLDGKLVLL

SEQ ID NO: 144322 - protein, 9 aa, Homo Sapiens
LLDLALEGM

SEQ ID NO: 144323 - protein, 9 aa, Homo Sapiens
LLDPDTAVL

SEQ ID NO: 144324 - protein, 9 aa, Homo Sapiens
LLDPLMPEL

SEQ ID NO: 144325 - protein, 9 aa, Homo Sapiens
LLDPVPPVL

SEQ ID NO: 144326 - protein, 9 aa, Homo Sapiens
LLMDRVDEM

SEQ ID NO: 144327 - protein, 9 aa, Homo Sapiens
LLPDIISRL

SEQ ID NO: 144328 - protein, 9 aa, Homo Sapiens
LLPEEQVYL

SEQ ID NO: 144329 - protein, 9 aa, Homo Sapiens
LLPERPSYL

SEQ ID NO: 144330 - protein, 9 aa, Homo Sapiens
LLPPPMKEL

SEQ ID NO: 144331 - protein, 9 aa, Homo Sapiens
LLPSHASYL

SEQ ID NO: 144332 - protein, 9 aa, Homo Sapiens
LMDGRDAFL

SEQ ID NO: 144333 - protein, 9 aa, Homo Sapiens
LMDREVALL

SEQ ID NO: 144334 - protein, 9 aa, Homo Sapiens
LSFDPLLIT

SEQ ID NO: 144335 - protein, 9 aa, Homo Sapiens
LTDPAIVKV

SEQ ID NO: 144336 - protein, 9 aa, Homo Sapiens
LVDLEPGTM

SEQ ID NO: 144337 - protein, 9 aa, Homo Sapiens
LVTVYAFPF

SEQ ID NO: 144338 - protein, 9 aa, Homo Sapiens
LWDEVLSHL

SEQ ID NO: 144339 - protein, 9 aa, Homo Sapiens
LWDFQGSTM

SEQ ID NO: 144340 - protein, 9 aa, Homo Sapiens
LWDKIAAQL

SEQ ID NO: 144341 - protein, 9 aa, Homo Sapiens
LWDLQDRVL

SEQ ID NO: 144342 - protein, 9 aa, Homo Sapiens
LWDNAFSEM

SEQ ID NO: 144343 - protein, 9 aa, Homo Sapiens
LWDPVIELI

SEQ ID NO: 144344 - protein, 9 aa, Homo Sapiens
LWDSAVSHF

SEQ ID NO: 144345 - protein, 9 aa, Homo Sapiens
LWEPTPVKL

SEQ ID NO: 144346 - protein, 9 aa, Homo Sapiens
LWEYDPVKL

SEQ ID NO: 144347 - protein, 9 aa, Homo Sapiens
LWPEKTSFL

SEQ ID NO: 144348 - protein, 9 aa, Homo Sapiens
LYDCLEEHL

SEQ ID NO: 144349 - protein, 9 aa, Homo Sapiens
LYDEAIRHF

SEQ ID NO: 144350 - protein, 9 aa, Homo Sapiens
LYDEIKKYV

SEQ ID NO: 144351 - protein, 9 aa, Homo Sapiens
LYDFIHTSF

SEQ ID NO: 144352 - protein, 9 aa, Homo Sapiens
LYDHTTILF

SEQ ID NO: 144353 - protein, 9 aa, Homo Sapiens
LYDICFRTL

SEQ ID NO: 144354 - protein, 9 aa, Homo Sapiens
LYDIILKNF

SEQ ID NO: 144355 - protein, 9 aa, Homo Sapiens
LYDIVFKHF

SEQ ID NO: 144356 - protein, 9 aa, Homo Sapiens
LYDLAAVVV

SEQ ID NO: 144357 - protein, 9 aa, Homo Sapiens
LYDLLGNVW

SEQ ID NO: 144358 - protein, 9 aa, Homo Sapiens
LYDLLVNEI

SEQ ID NO: 144359 - protein, 9 aa, Homo Sapiens
LYDLSKVVL

SEQ ID NO: 144360 - protein, 9 aa, Homo Sapiens
LYDLTLEYL

SEQ ID NO: 144361 - protein, 9 aa, Homo Sapiens
LYDLVTEKM

SEQ ID NO: 144362 - protein, 9 aa, Homo Sapiens
LYDPCTVMF

SEQ ID NO: 144363 - protein, 9 aa, Homo Sapiens
LYDPVISKL

SEQ ID NO: 144364 - protein, 9 aa, Homo Sapiens
LYDTHITVL

SEQ ID NO: 144365 - protein, 9 aa, Homo Sapiens
LYDVLGIEL

SEQ ID NO: 144366 - protein, 9 aa, Homo Sapiens
LYDVPANSM

SEQ ID NO: 144367 - protein, 9 aa, Homo Sapiens
LYDVRTILL

SEQ ID NO: 144368 - protein, 9 aa, Homo Sapiens
LYDVTWEEM

SEQ ID NO: 144369 - protein, 9 aa, Homo Sapiens
LYDVVDVKY

SEQ ID NO: 144370 - protein, 9 aa, Homo Sapiens
LYQIYIDEL

SEQ ID NO: 144371 - protein, 9 aa, Homo Sapiens
LYQYYLDHL

SEQ ID NO: 144372 - protein, 9 aa, Homo Sapiens
MAPLKMLAL

SEQ ID NO: 144373 - protein, 9 aa, Homo Sapiens
MFDDIGRNF

SEQ ID NO: 144374 - protein, 9 aa, Homo Sapiens
MFDEKLVTV

SEQ ID NO: 144375 - protein, 9 aa, Homo Sapiens
MFDELRTWL

SEQ ID NO: 144376 - protein, 9 aa, Homo Sapiens
MFDELTATY

SEQ ID NO: 144377 - protein, 9 aa, Homo Sapiens
MFDHIPVGV

SEQ ID NO: 144378 - protein, 9 aa, Homo Sapiens
MFDIVGTHL

SEQ ID NO: 144379 - protein, 9 aa, Homo Sapiens
MFDKDVVML

SEQ ID NO: 144380 - protein, 9 aa, Homo Sapiens
MFDLAVDAL

SEQ ID NO: 144381 - protein, 9 aa, Homo Sapiens
MFDNALSTL

SEQ ID NO: 144382 - protein, 9 aa, Homo Sapiens
MFDQQEIQV

SEQ ID NO: 144383 - protein, 9 aa, Homo Sapiens
MFNPMYALF

SEQ ID NO: 144384 - protein, 9 aa, Homo Sapiens
MFSDFLQSF

SEQ ID NO: 144385 - protein, 9 aa, Homo Sapiens
MLDLAKIIF

SEQ ID NO: 144386 - protein, 9 aa, Homo Sapiens
MLDPLEVHL

SEQ ID NO: 144387 - protein, 9 aa, Homo Sapiens
MLPSEPVLL

SEQ ID NO: 144388 - protein, 9 aa, Homo Sapiens
MMDDAVLCM

SEQ ID NO: 144389 - protein, 9 aa, Homo Sapiens
MMDFFNAQM

SEQ ID NO: 144390 - protein, 9 aa, Homo Sapiens
MMDVAFVQF

SEQ ID NO: 144391 - protein, 9 aa, Homo Sapiens
MMDVSGVGF

SEQ ID NO: 144392 - protein, 9 aa, Homo Sapiens
MQDPMEVFV

SEQ ID NO: 144393 - protein, 9 aa, Homo Sapiens
MTDPEMVEV

SEQ ID NO: 144394 - protein, 9 aa, Homo Sapiens
MVDGKPVNL

SEQ ID NO: 144395 - protein, 9 aa, Homo Sapiens
MVDPAINLF

SEQ ID NO: 144396 - protein, 9 aa, Homo Sapiens
MVDPFHTLF

SEQ ID NO: 144397 - protein, 9 aa, Homo Sapiens
MVDSKPVNL

SEQ ID NO: 144398 - protein, 9 aa, Homo Sapiens
MWDCATELL

SEQ ID NO: 144399 - protein, 9 aa, Homo Sapiens
MWDPAAQAF

SEQ ID NO: 144400 - protein, 9 aa, Homo Sapiens
MWDQRLVKL

SEQ ID NO: 144401 - protein, 9 aa, Homo Sapiens
MWDQRLVRL

SEQ ID NO: 144402 - protein, 9 aa, Homo Sapiens
MWDTRIAKL

SEQ ID NO: 144403 - protein, 9 aa, Homo Sapiens
MWEDFITCL

SEQ ID NO: 144404 - protein, 9 aa, Homo Sapiens
MWPLVAALL

SEQ ID NO: 144405 - protein, 9 aa, Homo Sapiens
MYDSFWRQF

SEQ ID NO: 144406 - protein, 9 aa, Homo Sapiens
MYEEFLSKV

SEQ ID NO: 144407 - protein, 9 aa, Homo Sapiens
MYEQQVVKL

SEQ ID NO: 144408 - protein, 9 aa, Homo Sapiens
MYPGLPSRL

SEQ ID NO: 144409 - protein, 9 aa, Homo Sapiens
NADAIVVKL

SEQ ID NO: 144410 - protein, 9 aa, Homo Sapiens
NFDALISKI

SEQ ID NO: 144411 - protein, 9 aa, Homo Sapiens
NFDCFGDKL

SEQ ID NO: 144412 - protein, 9 aa, Homo Sapiens
NFDDIKNGL

SEQ ID NO: 144413 - protein, 9 aa, Homo Sapiens
NFDDYTVNL

SEQ ID NO: 144414 - protein, 9 aa, Homo Sapiens
NFDEALVDY

SEQ ID NO: 144415 - protein, 9 aa, Homo Sapiens
NFDEENAYF

SEQ ID NO: 144416 - protein, 9 aa, Homo Sapiens
NFDEFSKHL

SEQ ID NO: 144417 - protein, 9 aa, Homo Sapiens
NFDEILRVV

SEQ ID NO: 144418 - protein, 9 aa, Homo Sapiens
NFDEKPVII

SEQ ID NO: 144419 - protein, 9 aa, Homo Sapiens
NFDFTRSYL

SEQ ID NO: 144420 - protein, 9 aa, Homo Sapiens
NFDGKFANL

SEQ ID NO: 144421 - protein, 9 aa, Homo Sapiens
NFDKIGKEF

SEQ ID NO: 144422 - protein, 9 aa, Homo Sapiens
NFDKIRVWL

SEQ ID NO: 144423 - protein, 9 aa, Homo Sapiens
NFDMFVSHY

SEQ ID NO: 144424 - protein, 9 aa, Homo Sapiens
NFDMLYNHV

SEQ ID NO: 144425 - protein, 9 aa, Homo Sapiens
NFDMTSKFL

SEQ ID NO: 144426 - protein, 9 aa, Homo Sapiens
NFDNILNSF

SEQ ID NO: 144427 - protein, 9 aa, Homo Sapiens
NFDRFSEMM

SEQ ID NO: 144428 - protein, 9 aa, Homo Sapiens
NFDRLVSNL

SEQ ID NO: 144429 - protein, 9 aa, Homo Sapiens
NFDTIDQQF

SEQ ID NO: 144430 - protein, 9 aa, Homo Sapiens
NFDVLDLHF

SEQ ID NO: 144431 - protein, 9 aa, Homo Sapiens
NFDVLMVKL

SEQ ID NO: 144432 - protein, 9 aa, Homo Sapiens
NFDVTYNWI

SEQ ID NO: 144433 - protein, 9 aa, Homo Sapiens
NFDWLENCL

SEQ ID NO: 144434 - protein, 9 aa, Homo Sapiens
NFDYLRKEM

SEQ ID NO: 144435 - protein, 9 aa, Homo Sapiens
NFEAATESF

SEQ ID NO: 144436 - protein, 9 aa, Homo Sapiens
NFEDEPPLL

SEQ ID NO: 144437 - protein, 9 aa, Homo Sapiens
NFEPHESFF

SEQ ID NO: 144438 - protein, 9 aa, Homo Sapiens
NFEVAESDF

SEQ ID NO: 144439 - protein, 9 aa, Homo Sapiens
NFEVSTVIF

SEQ ID NO: 144440 - protein, 9 aa, Homo Sapiens
NFMLHLVSM

SEQ ID NO: 144441 - protein, 9 aa, Homo Sapiens
NFPEMATYL

SEQ ID NO: 144442 - protein, 9 aa, Homo Sapiens
NFPNTPVKM

SEQ ID NO: 144443 - protein, 9 aa, Homo Sapiens
NFVEETVYL

SEQ ID NO: 144444 - protein, 9 aa, Homo Sapiens
NFYPFLQRF

SEQ ID NO: 144445 - protein, 9 aa, Homo Sapiens
NFYVFPKPF

SEQ ID NO: 144446 - protein, 9 aa, Homo Sapiens
NHDMTLTEF

SEQ ID NO: 144447 - protein, 9 aa, Homo Sapiens
NLDLTERQV

SEQ ID NO: 144448 - protein, 9 aa, Homo Sapiens
NLDPLVYLL

SEQ ID NO: 144449 - protein, 9 aa, Homo Sapiens
NLDQPPAFF

SEQ ID NO: 144450 - protein, 9 aa, Homo Sapiens
NMDLMRADM

SEQ ID NO: 144451 - protein, 9 aa, Homo Sapiens
NTDEPPMVF

SEQ ID NO: 144452 - protein, 9 aa, Homo Sapiens
NWFVWVTQM

SEQ ID NO: 144453 - protein, 9 aa, Homo Sapiens
NYDAALRKI

SEQ ID NO: 144454 - protein, 9 aa, Homo Sapiens
NYDACLQHL

SEQ ID NO: 144455 - protein, 9 aa, Homo Sapiens
NYDDIRTEL

SEQ ID NO: 144456 - protein, 9 aa, Homo Sapiens
NYDEALRLL

SEQ ID NO: 144457 - protein, 9 aa, Homo Sapiens
NYDEFICTF

SEQ ID NO: 144458 - protein, 9 aa, Homo Sapiens
NYDEFPTMV

SEQ ID NO: 144459 - protein, 9 aa, Homo Sapiens
NYDEHISNF

SEQ ID NO: 144460 - protein, 9 aa, Homo Sapiens
NYDEMCFHI

SEQ ID NO: 144461 - protein, 9 aa, Homo Sapiens
NYDEMKDFI

SEQ ID NO: 144462 - protein, 9 aa, Homo Sapiens
NYDETISTL

SEQ ID NO: 144463 - protein, 9 aa, Homo Sapiens
NYDFGPIHM

SEQ ID NO: 144464 - protein, 9 aa, Homo Sapiens
NYDIAIAEL

SEQ ID NO: 144465 - protein, 9 aa, Homo Sapiens
NYDLALKYF

SEQ ID NO: 144466 - protein, 9 aa, Homo Sapiens
NYDLCSIFL

SEQ ID NO: 144467 - protein, 9 aa, Homo Sapiens
NYDPLPMWI

SEQ ID NO: 144468 - protein, 9 aa, Homo Sapiens
NYDVLANEI

SEQ ID NO: 144469 - protein, 9 aa, Homo Sapiens
NYDYAVYLL

SEQ ID NO: 144470 - protein, 9 aa, Homo Sapiens
NYDYLKGFL

SEQ ID NO: 144471 - protein, 9 aa, Homo Sapiens
NYEDVATFL

SEQ ID NO: 144472 - protein, 9 aa, Homo Sapiens
NYFLWTEKF

SEQ ID NO: 144473 - protein, 9 aa, Homo Sapiens
NYSDAIVWL

SEQ ID NO: 144474 - protein, 9 aa, Homo Sapiens
PFDLQSVIF

SEQ ID NO: 144475 - protein, 9 aa, Homo Sapiens
PIRLLAAAA

SEQ ID NO: 144476 - protein, 9 aa, Homo Sapiens
PLLSASIAL

SEQ ID NO: 144477 - protein, 9 aa, Homo Sapiens
QFDDVLIYL

SEQ ID NO: 144478 - protein, 9 aa, Homo Sapiens
QFDEFCKQM

SEQ ID NO: 144479 - protein, 9 aa, Homo Sapiens
QFDFVVRMM

SEQ ID NO: 144480 - protein, 9 aa, Homo Sapiens
QFDMTRNLF

SEQ ID NO: 144481 - protein, 9 aa, Homo Sapiens
QFDNFKRVF

SEQ ID NO: 144482 - protein, 9 aa, Homo Sapiens
QFDPQPLAM

SEQ ID NO: 144483 - protein, 9 aa, Homo Sapiens
QFDTDAVRL

SEQ ID NO: 144484 - protein, 9 aa, Homo Sapiens
QFDVQRKYF

SEQ ID NO: 144485 - protein, 9 aa, Homo Sapiens
QFHMQLNEM

SEQ ID NO: 144486 - protein, 9 aa, Homo Sapiens
QFPTPEAVL

SEQ ID NO: 144487 - protein, 9 aa, Homo Sapiens
QIPEIKQTL

SEQ ID NO: 144488 - protein, 9 aa, Homo Sapiens
QLDPLVVEL

SEQ ID NO: 144489 - protein, 9 aa, Homo Sapiens
QWDELLCQL

SEQ ID NO: 144490 - protein, 9 aa, Homo Sapiens
QWDLRLTAV

SEQ ID NO: 144491 - protein, 9 aa, Homo Sapiens
QWDLVENYL

SEQ ID NO: 144492 - protein, 9 aa, Homo Sapiens
QWDPMITTL

SEQ ID NO: 144493 - protein, 9 aa, Homo Sapiens
QYDEAVAQF

SEQ ID NO: 144494 - protein, 9 aa, Homo Sapiens
QYDMTLTSF

SEQ ID NO: 144495 - protein, 9 aa, Homo Sapiens
RFAARPVLL

SEQ ID NO: 144496 - protein, 9 aa, Homo Sapiens
RFDCAIVLL

SEQ ID NO: 144497 - protein, 9 aa, Homo Sapiens
RFDCSDRQF

SEQ ID NO: 144498 - protein, 9 aa, Homo Sapiens
RFDDGLVHL

SEQ ID NO: 144499 - protein, 9 aa, Homo Sapiens
RFDEAYIYM

SEQ ID NO: 144500 - protein, 9 aa, Homo Sapiens
RFDEGPVRL

SEQ ID NO: 144501 - protein, 9 aa, Homo Sapiens
RFDESMQVF

SEQ ID NO: 144502 - protein, 9 aa, Homo Sapiens
RFDGMLLAM

SEQ ID NO: 144503 - protein, 9 aa, Homo Sapiens
RFDGRVVLV

SEQ ID NO: 144504 - protein, 9 aa, Homo Sapiens
RFDGVTSML

SEQ ID NO: 144505 - protein, 9 aa, Homo Sapiens
RFDKEVALF

SEQ ID NO: 144506 - protein, 9 aa, Homo Sapiens
RFDLLKRIL

SEQ ID NO: 144507 - protein, 9 aa, Homo Sapiens
RFDMAVMFM

SEQ ID NO: 144508 - protein, 9 aa, Homo Sapiens
RFDNADRMF

SEQ ID NO: 144509 - protein, 9 aa, Homo Sapiens
RFDPLGHYL

SEQ ID NO: 144510 - protein, 9 aa, Homo Sapiens
RFDPTWESL

SEQ ID NO: 144511 - protein, 9 aa, Homo Sapiens
RFDPVRVDI

SEQ ID NO: 144512 - protein, 9 aa, Homo Sapiens
RFDSDVGEF

SEQ ID NO: 144513 - protein, 9 aa, Homo Sapiens
RFDVHDVTL

SEQ ID NO: 144514 - protein, 9 aa, Homo Sapiens
RFDVSLVYL

SEQ ID NO: 144515 - protein, 9 aa, Homo Sapiens
RFDYTNSEF

SEQ ID NO: 144516 - protein, 9 aa, Homo Sapiens
RFDYVPSFL

SEQ ID NO: 144517 - protein, 9 aa, Homo Sapiens
RFEEETVLL

SEQ ID NO: 144518 - protein, 9 aa, Homo Sapiens
RFMDLATYI

SEQ ID NO: 144519 - protein, 9 aa, Homo Sapiens
RFPDLTVEL

SEQ ID NO: 144520 - protein, 9 aa, Homo Sapiens
RFSDHVALL

SEQ ID NO: 144521 - protein, 9 aa, Homo Sapiens
RFWTWINHF

SEQ ID NO: 144522 - protein, 9 aa, Homo Sapiens
RFWYFVSQL

SEQ ID NO: 144523 - protein, 9 aa, Homo Sapiens
RLPNRPACL

SEQ ID NO: 144524 - protein, 9 aa, Homo Sapiens
RMPEKVTWM

SEQ ID NO: 144525 - protein, 9 aa, Homo Sapiens
RQDPFTVHM

SEQ ID NO: 144526 - protein, 9 aa, Homo Sapiens
RTDPIPIVV

SEQ ID NO: 144527 - protein, 9 aa, Homo Sapiens
RTDPVPVTI

SEQ ID NO: 144528 - protein, 9 aa, Homo Sapiens
RVYEFLDKL

SEQ ID NO: 144529 - protein, 9 aa, Homo Sapiens
RWDAIVAEV

SEQ ID NO: 144530 - protein, 9 aa, Homo Sapiens
RWDDSVTYI

SEQ ID NO: 144531 - protein, 9 aa, Homo Sapiens
RWDEAFRKF

SEQ ID NO: 144532 - protein, 9 aa, Homo Sapiens
RWEDTPLVI

SEQ ID NO: 144533 - protein, 9 aa, Homo Sapiens
RYDCVVLFL

SEQ ID NO: 144534 - protein, 9 aa, Homo Sapiens
RYDDMAAAM

SEQ ID NO: 144535 - protein, 9 aa, Homo Sapiens
RYDDMATCM

SEQ ID NO: 144536 - protein, 9 aa, Homo Sapiens
RYDEFLVHM

SEQ ID NO: 144537 - protein, 9 aa, Homo Sapiens
RYDEIKEEF

SEQ ID NO: 144538 - protein, 9 aa, Homo Sapiens
RYDEMVESM

SEQ ID NO: 144539 - protein, 9 aa, Homo Sapiens
RYDGQIAVF

SEQ ID NO: 144540 - protein, 9 aa, Homo Sapiens
RYDGQVAVF

SEQ ID NO: 144541 - protein, 9 aa, Homo Sapiens
RYDLGGLVM

SEQ ID NO: 144542 - protein, 9 aa, Homo Sapiens
RYDLSPITV

SEQ ID NO: 144543 - protein, 9 aa, Homo Sapiens
RYDNVTILF

SEQ ID NO: 144544 - protein, 9 aa, Homo Sapiens
RYPDRITLI

SEQ ID NO: 144545 - protein, 9 aa, Homo Sapiens
SADFPALVV

SEQ ID NO: 144546 - protein, 9 aa, Homo Sapiens
SADPNVVDL

SEQ ID NO: 144547 - protein, 9 aa, Homo Sapiens
SALPLLSAL

SEQ ID NO: 144548 - protein, 9 aa, Homo Sapiens
SAPKYIDYL

SEQ ID NO: 144549 - protein, 9 aa, Homo Sapiens
SFDAHLTEL

SEQ ID NO: 144550 - protein, 9 aa, Homo Sapiens
SFDAMFREA

SEQ ID NO: 144551 - protein, 9 aa, Homo Sapiens
SFDATTCIW

SEQ ID NO: 144552 - protein, 9 aa, Homo Sapiens
SFDAVLEAL

SEQ ID NO: 144553 - protein, 9 aa, Homo Sapiens
SFDCIQQTF

SEQ ID NO: 144554 - protein, 9 aa, Homo Sapiens
SFDDLIACV

SEQ ID NO: 144555 - protein, 9 aa, Homo Sapiens
SFDEFIKIF

SEQ ID NO: 144556 - protein, 9 aa, Homo Sapiens
SFDEIHQLF

SEQ ID NO: 144557 - protein, 9 aa, Homo Sapiens
SFDEMNAEL

SEQ ID NO: 144558 - protein, 9 aa, Homo Sapiens
SFDETCTRF

SEQ ID NO: 144559 - protein, 9 aa, Homo Sapiens
SFDETLTAL

SEQ ID NO: 144560 - protein, 9 aa, Homo Sapiens
SFDETVTHF

SEQ ID NO: 144561 - protein, 9 aa, Homo Sapiens
SFDEVEGVF

SEQ ID NO: 144562 - protein, 9 aa, Homo Sapiens
SFDEYSSEL

SEQ ID NO: 144563 - protein, 9 aa, Homo Sapiens
SFDGIIAMM

SEQ ID NO: 144564 - protein, 9 aa, Homo Sapiens
SFDGIYANM

SEQ ID NO: 144565 - protein, 9 aa, Homo Sapiens
SFDHVPALV

SEQ ID NO: 144566 - protein, 9 aa, Homo Sapiens
SFDIQLTSV

SEQ ID NO: 144567 - protein, 9 aa, Homo Sapiens
SFDITGRFL

SEQ ID NO: 144568 - protein, 9 aa, Homo Sapiens
SFDKLEAVV

SEQ ID NO: 144569 - protein, 9 aa, Homo Sapiens
SFDKSIRIF

SEQ ID NO: 144570 - protein, 9 aa, Homo Sapiens
SFDKTASVF

SEQ ID NO: 144571 - protein, 9 aa, Homo Sapiens
SFDLAIKGV

SEQ ID NO: 144572 - protein, 9 aa, Homo Sapiens
SFDLAKVLL

SEQ ID NO: 144573 - protein, 9 aa, Homo Sapiens
SFDLGRQFL

SEQ ID NO: 144574 - protein, 9 aa, Homo Sapiens
SFDLLPREF

SEQ ID NO: 144575 - protein, 9 aa, Homo Sapiens
SFDLLVKNL

SEQ ID NO: 144576 - protein, 9 aa, Homo Sapiens
SFDLNTIQI

SEQ ID NO: 144577 - protein, 9 aa, Homo Sapiens
SFDLVAQMI

SEQ ID NO: 144578 - protein, 9 aa, Homo Sapiens
SFDNIKNWI

SEQ ID NO: 144579 - protein, 9 aa, Homo Sapiens
SFDNIRNWI

SEQ ID NO: 144580 - protein, 9 aa, Homo Sapiens
SFDPKDIFL

SEQ ID NO: 144581 - protein, 9 aa, Homo Sapiens
SFDPLASFI

SEQ ID NO: 144582 - protein, 9 aa, Homo Sapiens
SFDPLLITL

SEQ ID NO: 144583 - protein, 9 aa, Homo Sapiens
SFDPNLSEL

SEQ ID NO: 144584 - protein, 9 aa, Homo Sapiens
SFDSALQSV

SEQ ID NO: 144585 - protein, 9 aa, Homo Sapiens
SFDSGIAGL

SEQ ID NO: 144586 - protein, 9 aa, Homo Sapiens
SFDSVPVSL

SEQ ID NO: 144587 - protein, 9 aa, Homo Sapiens
SFDTGFTSF

SEQ ID NO: 144588 - protein, 9 aa, Homo Sapiens
SFDTMQQEL

SEQ ID NO: 144589 - protein, 9 aa, Homo Sapiens
SFDVADRMF

SEQ ID NO: 144590 - protein, 9 aa, Homo Sapiens
SFDVFHRAF

SEQ ID NO: 144591 - protein, 9 aa, Homo Sapiens
SFDVGCNLF

SEQ ID NO: 144592 - protein, 9 aa, Homo Sapiens
SFDVTNKCL

SEQ ID NO: 144593 - protein, 9 aa, Homo Sapiens
SFDVTQSPF

SEQ ID NO: 144594 - protein, 9 aa, Homo Sapiens
SFDVVTKCV

SEQ ID NO: 144595 - protein, 9 aa, Homo Sapiens
SFDYSNTVM

SEQ ID NO: 144596 - protein, 9 aa, Homo Sapiens
SFEEKPVYI

SEQ ID NO: 144597 - protein, 9 aa, Homo Sapiens
SFPEHPAFL

SEQ ID NO: 144598 - protein, 9 aa, Homo Sapiens
SFPSEPVKL

SEQ ID NO: 144599 - protein, 9 aa, Homo Sapiens
SIPERPAQL

SEQ ID NO: 144600 - protein, 9 aa, Homo Sapiens
SLDAFMSEM

SEQ ID NO: 144601 - protein, 9 aa, Homo Sapiens
SLDDGWIRF

SEQ ID NO: 144602 - protein, 9 aa, Homo Sapiens
SLDPLPPYI

SEQ ID NO: 144603 - protein, 9 aa, Homo Sapiens
SLIEQTTAL

SEQ ID NO: 144604 - protein, 9 aa, Homo Sapiens
SLPDIPAHL

SEQ ID NO: 144605 - protein, 9 aa, Homo Sapiens
SLPNEIAYL

SEQ ID NO: 144606 - protein, 9 aa, Homo Sapiens
SMDEALEKF

SEQ ID NO: 144607 - protein, 9 aa, Homo Sapiens
SMDPLPVFL

SEQ ID NO: 144608 - protein, 9 aa, Homo Sapiens
SQISFIDYF

SEQ ID NO: 144609 - protein, 9 aa, Homo Sapiens
SVDLQTRIM

SEQ ID NO: 144610 - protein, 9 aa, Homo Sapiens
SVDVTNTTF

SEQ ID NO: 144611 - protein, 9 aa, Homo Sapiens
SVPVSLQTL

SEQ ID NO: 144612 - protein, 9 aa, Homo Sapiens
SWDEAVQAL

SEQ ID NO: 144613 - protein, 9 aa, Homo Sapiens
SWDEHVFEL

SEQ ID NO: 144614 - protein, 9 aa, Homo Sapiens
SWDGRYALV

SEQ ID NO: 144615 - protein, 9 aa, Homo Sapiens
SWDIVVQRV

SEQ ID NO: 144616 - protein, 9 aa, Homo Sapiens
SWDKILALV

SEQ ID NO: 144617 - protein, 9 aa, Homo Sapiens
SWDLPGSHV

SEQ ID NO: 144618 - protein, 9 aa, Homo Sapiens
SWDSRDVVL

SEQ ID NO: 144619 - protein, 9 aa, Homo Sapiens
SWEDAAILL

SEQ ID NO: 144620 - protein, 9 aa, Homo Sapiens
SWPTKIIYL

SEQ ID NO: 144621 - protein, 9 aa, Homo Sapiens
SYDEAILHL

SEQ ID NO: 144622 - protein, 9 aa, Homo Sapiens
SYDEAILRL

SEQ ID NO: 144623 - protein, 9 aa, Homo Sapiens
SYDFFSGEF

SEQ ID NO: 144624 - protein, 9 aa, Homo Sapiens
SYDGRAYVI

SEQ ID NO: 144625 - protein, 9 aa, Homo Sapiens
SYDHVELTF

SEQ ID NO: 144626 - protein, 9 aa, Homo Sapiens
SYDHVIYSL

SEQ ID NO: 144627 - protein, 9 aa, Homo Sapiens
SYDLAIKAI

SEQ ID NO: 144628 - protein, 9 aa, Homo Sapiens
SYDLANRDF

SEQ ID NO: 144629 - protein, 9 aa, Homo Sapiens
SYDLFVNSF

SEQ ID NO: 144630 - protein, 9 aa, Homo Sapiens
SYDNVLIKW

SEQ ID NO: 144631 - protein, 9 aa, Homo Sapiens
SYDPLRIYL

SEQ ID NO: 144632 - protein, 9 aa, Homo Sapiens
SYDPLVIYL

SEQ ID NO: 144633 - protein, 9 aa, Homo Sapiens
SYDPVTNTW

SEQ ID NO: 144634 - protein, 9 aa, Homo Sapiens
SYDSKLVWF

SEQ ID NO: 144635 - protein, 9 aa, Homo Sapiens
SYDSVLALV

SEQ ID NO: 144636 - protein, 9 aa, Homo Sapiens
SYDTFVVRV

SEQ ID NO: 144637 - protein, 9 aa, Homo Sapiens
SYDTHWITM

SEQ ID NO: 144638 - protein, 9 aa, Homo Sapiens
SYDTTCIGL

SEQ ID NO: 144639 - protein, 9 aa, Homo Sapiens
SYDTWVSRV

SEQ ID NO: 144640 - protein, 9 aa, Homo Sapiens
SYDVFQLEF

SEQ ID NO: 144641 - protein, 9 aa, Homo Sapiens
SYDVRIENF

SEQ ID NO: 144642 - protein, 9 aa, Homo Sapiens
SYDWFPAEL

SEQ ID NO: 144643 - protein, 9 aa, Homo Sapiens
SYEDRVTFL

SEQ ID NO: 144644 - protein, 9 aa, Homo Sapiens
SYEYPEYFL

SEQ ID NO: 144645 - protein, 9 aa, Homo Sapiens
SYIELPAYL

SEQ ID NO: 144646 - protein, 9 aa, Homo Sapiens
SYMEVPTYL

SEQ ID NO: 144647 - protein, 9 aa, Homo Sapiens
SYMPVIDVF

SEQ ID NO: 144648 - protein, 9 aa, Homo Sapiens
SYNLFSREF

SEQ ID NO: 144649 - protein, 9 aa, Homo Sapiens
SYWEWLPLL

SEQ ID NO: 144650 - protein, 9 aa, Homo Sapiens
TFDAGLQAF

SEQ ID NO: 144651 - protein, 9 aa, Homo Sapiens
TFDAHLTEL

SEQ ID NO: 144652 - protein, 9 aa, Homo Sapiens
TFDAQIVII

SEQ ID NO: 144653 - protein, 9 aa, Homo Sapiens
TFDASRTTF

SEQ ID NO: 144654 - protein, 9 aa, Homo Sapiens
TFDDIVHSF

SEQ ID NO: 144655 - protein, 9 aa, Homo Sapiens
TFDDLLNRL

SEQ ID NO: 144656 - protein, 9 aa, Homo Sapiens
TFDDLPARF

SEQ ID NO: 144657 - protein, 9 aa, Homo Sapiens
TFDDVAVHF

SEQ ID NO: 144658 - protein, 9 aa, Homo Sapiens
TFDDVAVTF

SEQ ID NO: 144659 - protein, 9 aa, Homo Sapiens
TFDDVAVYF

SEQ ID NO: 144660 - protein, 9 aa, Homo Sapiens
TFDEIASGF

SEQ ID NO: 144661 - protein, 9 aa, Homo Sapiens
TFDEIVCKI

SEQ ID NO: 144662 - protein, 9 aa, Homo Sapiens
TFDETVSTY

SEQ ID NO: 144663 - protein, 9 aa, Homo Sapiens
TFDEVLELM

SEQ ID NO: 144664 - protein, 9 aa, Homo Sapiens
TFDFQNDFL

SEQ ID NO: 144665 - protein, 9 aa, Homo Sapiens
TFDFVHNVM

SEQ ID NO: 144666 - protein, 9 aa, Homo Sapiens
TFDIASDAF

SEQ ID NO: 144667 - protein, 9 aa, Homo Sapiens
TFDIEAVTL

SEQ ID NO: 144668 - protein, 9 aa, Homo Sapiens
TFDISILEI

SEQ ID NO: 144669 - protein, 9 aa, Homo Sapiens
TFDLAAPTV

SEQ ID NO: 144670 - protein, 9 aa, Homo Sapiens
TFDLLFVTL

SEQ ID NO: 144671 - protein, 9 aa, Homo Sapiens
TFDLLRNSY

SEQ ID NO: 144672 - protein, 9 aa, Homo Sapiens
TFDLMQILL

SEQ ID NO: 144673 - protein, 9 aa, Homo Sapiens
TFDLQMKFV

SEQ ID NO: 144674 - protein, 9 aa, Homo Sapiens
TFDLQRIGF

SEQ ID NO: 144675 - protein, 9 aa, Homo Sapiens
TFDLTVVSY

SEQ ID NO: 144676 - protein, 9 aa, Homo Sapiens
TFDNEIVMM

SEQ ID NO: 144677 - protein, 9 aa, Homo Sapiens
TFDNIYLHV

SEQ ID NO: 144678 - protein, 9 aa, Homo Sapiens
TFDNVTSYL

SEQ ID NO: 144679 - protein, 9 aa, Homo Sapiens
TFDPIHQWL

SEQ ID NO: 144680 - protein, 9 aa, Homo Sapiens
TFDPMTRQI

SEQ ID NO: 144681 - protein, 9 aa, Homo Sapiens
TFDPQRQTV

SEQ ID NO: 144682 - protein, 9 aa, Homo Sapiens
TFDPSLAYY

SEQ ID NO: 144683 - protein, 9 aa, Homo Sapiens
TFDPVTKML

SEQ ID NO: 144684 - protein, 9 aa, Homo Sapiens
TFDPVTKVL

SEQ ID NO: 144685 - protein, 9 aa, Homo Sapiens
TFDQKIVEW

SEQ ID NO: 144686 - protein, 9 aa, Homo Sapiens
TFDRSVTLL

SEQ ID NO: 144687 - protein, 9 aa, Homo Sapiens
TFDSEVELM

SEQ ID NO: 144688 - protein, 9 aa, Homo Sapiens
TFDSSCHFF

SEQ ID NO: 144689 - protein, 9 aa, Homo Sapiens
TFDSSGAFL

SEQ ID NO: 144690 - protein, 9 aa, Homo Sapiens
TFDSTIHFY

SEQ ID NO: 144691 - protein, 9 aa, Homo Sapiens
TFDTTFSHF

SEQ ID NO: 144692 - protein, 9 aa, Homo Sapiens
TFDVAPSRL

SEQ ID NO: 144693 - protein, 9 aa, Homo Sapiens
TFDVSILTI

SEQ ID NO: 144694 - protein, 9 aa, Homo Sapiens
TFEDFVAII

SEQ ID NO: 144695 - protein, 9 aa, Homo Sapiens
TFEDVAIDF

SEQ ID NO: 144696 - protein, 9 aa, Homo Sapiens
TFEDVAVHF

SEQ ID NO: 144697 - protein, 9 aa, Homo Sapiens
TFEDVAVHL

SEQ ID NO: 144698 - protein, 9 aa, Homo Sapiens
TFEDVAVLF

SEQ ID NO: 144699 - protein, 9 aa, Homo Sapiens
TFEDVAVLL

SEQ ID NO: 144700 - protein, 9 aa, Homo Sapiens
TFEDVAVYF

SEQ ID NO: 144701 - protein, 9 aa, Homo Sapiens
TFESLVAKL

SEQ ID NO: 144702 - protein, 9 aa, Homo Sapiens
TFPNNPVEL

SEQ ID NO: 144703 - protein, 9 aa, Homo Sapiens
TFPQNPVEL

SEQ ID NO: 144704 - protein, 9 aa, Homo Sapiens
TFQPYLDTL

SEQ ID NO: 144705 - protein, 9 aa, Homo Sapiens
TFVSPEVFL

SEQ ID NO: 144706 - protein, 9 aa, Homo Sapiens
TFWLLLRQF

SEQ ID NO: 144707 - protein, 9 aa, Homo Sapiens
TIPITPAFL

SEQ ID NO: 144708 - protein, 9 aa, Homo Sapiens
TLDELPAML

SEQ ID NO: 144709 - protein, 9 aa, Homo Sapiens
TLDVGGLVF

SEQ ID NO: 144710 - protein, 9 aa, Homo Sapiens
TMDIHLNEM

SEQ ID NO: 144711 - protein, 9 aa, Homo Sapiens
TPEGYYMFI

SEQ ID NO: 144712 - protein, 9 aa, Homo Sapiens
TSEPSRDSF

SEQ ID NO: 144713 - protein, 9 aa, Homo Sapiens
TVDFLSLDL

SEQ ID NO: 144714 - protein, 9 aa, Homo Sapiens
TVEEVFLNL

SEQ ID NO: 144715 - protein, 9 aa, Homo Sapiens
TVPVRLSSL

SEQ ID NO: 144716 - protein, 9 aa, Homo Sapiens
TWDCMKTQL

SEQ ID NO: 144717 - protein, 9 aa, Homo Sapiens
TWDDAFATF

SEQ ID NO: 144718 - protein, 9 aa, Homo Sapiens
TWDELGEAL

SEQ ID NO: 144719 - protein, 9 aa, Homo Sapiens
TWDELVEHL

SEQ ID NO: 144720 - protein, 9 aa, Homo Sapiens
TWDEYNIQM

SEQ ID NO: 144721 - protein, 9 aa, Homo Sapiens
TWDLTGLLL

SEQ ID NO: 144722 - protein, 9 aa, Homo Sapiens
TWDPALAQI

SEQ ID NO: 144723 - protein, 9 aa, Homo Sapiens
TWDPLGQYV

SEQ ID NO: 144724 - protein, 9 aa, Homo Sapiens
TWDRTPVSM

SEQ ID NO: 144725 - protein, 9 aa, Homo Sapiens
TWDYTNPNL

SEQ ID NO: 144726 - protein, 9 aa, Homo Sapiens
TWDYVAPFL

SEQ ID NO: 144727 - protein, 9 aa, Homo Sapiens
TWEAQPVKV

SEQ ID NO: 144728 - protein, 9 aa, Homo Sapiens
TWPDKVVCV

SEQ ID NO: 144729 - protein, 9 aa, Homo Sapiens
TWYLDESTL

SEQ ID NO: 144730 - protein, 9 aa, Homo Sapiens
TYDDFRNVL

SEQ ID NO: 144731 - protein, 9 aa, Homo Sapiens
TYDEIGVMF

SEQ ID NO: 144732 - protein, 9 aa, Homo Sapiens
TYDEVKARL

SEQ ID NO: 144733 - protein, 9 aa, Homo Sapiens
TYDIGHVLL

SEQ ID NO: 144734 - protein, 9 aa, Homo Sapiens
TYDIVITTY

SEQ ID NO: 144735 - protein, 9 aa, Homo Sapiens
TYDLIANIV

SEQ ID NO: 144736 - protein, 9 aa, Homo Sapiens
TYDLMSSAY

SEQ ID NO: 144737 - protein, 9 aa, Homo Sapiens
TYDLPGNFL

SEQ ID NO: 144738 - protein, 9 aa, Homo Sapiens
TYDLQESNV

SEQ ID NO: 144739 - protein, 9 aa, Homo Sapiens
TYDPETQEF

SEQ ID NO: 144740 - protein, 9 aa, Homo Sapiens
TYDPWIGKL

SEQ ID NO: 144741 - protein, 9 aa, Homo Sapiens
TYDYAKTIL

SEQ ID NO: 144742 - protein, 9 aa, Homo Sapiens
TYDYGGFTM

SEQ ID NO: 144743 - protein, 9 aa, Homo Sapiens
TYEGKPIFL

SEQ ID NO: 144744 - protein, 9 aa, Homo Sapiens
TYYLWVKSV

SEQ ID NO: 144745 - protein, 9 aa, Homo Sapiens
VADDTPVLL

SEQ ID NO: 144746 - protein, 9 aa, Homo Sapiens
VADGYPVRL

SEQ ID NO: 144747 - protein, 9 aa, Homo Sapiens
VADLAESIM

SEQ ID NO: 144748 - protein, 9 aa, Homo Sapiens
VADLQLIDF

SEQ ID NO: 144749 - protein, 9 aa, Homo Sapiens
VADLVGFLL

SEQ ID NO: 144750 - protein, 9 aa, Homo Sapiens
VADPIIYVL

SEQ ID NO: 144751 - protein, 9 aa, Homo Sapiens
VADPVEAVL

SEQ ID NO: 144752 - protein, 9 aa, Homo Sapiens
VADPYVVIM

SEQ ID NO: 144753 - protein, 9 aa, Homo Sapiens
VFDAFLNMM

SEQ ID NO: 144754 - protein, 9 aa, Homo Sapiens
VFDARELEL

SEQ ID NO: 144755 - protein, 9 aa, Homo Sapiens
VFDASSIQY

SEQ ID NO: 144756 - protein, 9 aa, Homo Sapiens
VFDCMELVM

SEQ ID NO: 144757 - protein, 9 aa, Homo Sapiens
VFDCVVTSL

SEQ ID NO: 144758 - protein, 9 aa, Homo Sapiens
VFDDIETNM

SEQ ID NO: 144759 - protein, 9 aa, Homo Sapiens
VFDDMINLL

SEQ ID NO: 144760 - protein, 9 aa, Homo Sapiens
VFDDSGSIF

SEQ ID NO: 144761 - protein, 9 aa, Homo Sapiens
VFDDTITEM

SEQ ID NO: 144762 - protein, 9 aa, Homo Sapiens
VFDDTLGSF

SEQ ID NO: 144763 - protein, 9 aa, Homo Sapiens
VFDEADRLF

SEQ ID NO: 144764 - protein, 9 aa, Homo Sapiens
VFDEADRMF

SEQ ID NO: 144765 - protein, 9 aa, Homo Sapiens
VFDEAIIAI

SEQ ID NO: 144766 - protein, 9 aa, Homo Sapiens
VFDEAILAA

SEQ ID NO: 144767 - protein, 9 aa, Homo Sapiens
VFDEAIRAV

SEQ ID NO: 144768 - protein, 9 aa, Homo Sapiens
VFDESLSMF

SEQ ID NO: 144769 - protein, 9 aa, Homo Sapiens
VFDESTRKI

SEQ ID NO: 144770 - protein, 9 aa, Homo Sapiens
VFDEVVQIF

SEQ ID NO: 144771 - protein, 9 aa, Homo Sapiens
VFDEWVSKL

SEQ ID NO: 144772 - protein, 9 aa, Homo Sapiens
VFDFAGEEV

SEQ ID NO: 144773 - protein, 9 aa, Homo Sapiens
VFDFCEHDL

SEQ ID NO: 144774 - protein, 9 aa, Homo Sapiens
VFDGCPLKI

SEQ ID NO: 144775 - protein, 9 aa, Homo Sapiens
VFDGKPPQL

SEQ ID NO: 144776 - protein, 9 aa, Homo Sapiens
VFDHPWETV

SEQ ID NO: 144777 - protein, 9 aa, Homo Sapiens
VFDIGVRVV

SEQ ID NO: 144778 - protein, 9 aa, Homo Sapiens
VFDIVIHRF

SEQ ID NO: 144779 - protein, 9 aa, Homo Sapiens
VFDKMSSLL

SEQ ID NO: 144780 - protein, 9 aa, Homo Sapiens
VFDKTLAEL

SEQ ID NO: 144781 - protein, 9 aa, Homo Sapiens
VFDKVKVKI

SEQ ID NO: 144782 - protein, 9 aa, Homo Sapiens
VFDLGGGTF

SEQ ID NO: 144783 - protein, 9 aa, Homo Sapiens
VFDLIQELF

SEQ ID NO: 144784 - protein, 9 aa, Homo Sapiens
VFDLQWLEL

SEQ ID NO: 144785 - protein, 9 aa, Homo Sapiens
VFDLQWMEV

SEQ ID NO: 144786 - protein, 9 aa, Homo Sapiens
VFDLTKEIF

SEQ ID NO: 144787 - protein, 9 aa, Homo Sapiens
VFDMVVAHI

SEQ ID NO: 144788 - protein, 9 aa, Homo Sapiens
VFDNKVLTI

SEQ ID NO: 144789 - protein, 9 aa, Homo Sapiens
VFDNLIISL

SEQ ID NO: 144790 - protein, 9 aa, Homo Sapiens
VFDNSIKTF

SEQ ID NO: 144791 - protein, 9 aa, Homo Sapiens
VFDNTPAAL

SEQ ID NO: 144792 - protein, 9 aa, Homo Sapiens
VFDNVKDFF

SEQ ID NO: 144793 - protein, 9 aa, Homo Sapiens
VFDNYAVTV

SEQ ID NO: 144794 - protein, 9 aa, Homo Sapiens
VFDPALNLF

SEQ ID NO: 144795 - protein, 9 aa, Homo Sapiens
VFDPIANCW

SEQ ID NO: 144796 - protein, 9 aa, Homo Sapiens
VFDPIGHFT

SEQ ID NO: 144797 - protein, 9 aa, Homo Sapiens
VFDPKVFTF

SEQ ID NO: 144798 - protein, 9 aa, Homo Sapiens
VFDPVPVGV

SEQ ID NO: 144799 - protein, 9 aa, Homo Sapiens
VFDPVQKTL

SEQ ID NO: 144800 - protein, 9 aa, Homo Sapiens
VFDPVTKLW

SEQ ID NO: 144801 - protein, 9 aa, Homo Sapiens
VFDQPQEYF

SEQ ID NO: 144802 - protein, 9 aa, Homo Sapiens
VFDRMKVAL

SEQ ID NO: 144803 - protein, 9 aa, Homo Sapiens
VFDSVNARL

SEQ ID NO: 144804 - protein, 9 aa, Homo Sapiens
VFDTAIAHL

SEQ ID NO: 144805 - protein, 9 aa, Homo Sapiens
VFDTPEEAF

SEQ ID NO: 144806 - protein, 9 aa, Homo Sapiens
VFDTSIAQL

SEQ ID NO: 144807 - protein, 9 aa, Homo Sapiens
VFDTYMLFF

SEQ ID NO: 144808 - protein, 9 aa, Homo Sapiens
VFDVESREL

SEQ ID NO: 144809 - protein, 9 aa, Homo Sapiens
VFDVGGLLE

SEQ ID NO: 144810 - protein, 9 aa, Homo Sapiens
VFDVIIRCF

SEQ ID NO: 144811 - protein, 9 aa, Homo Sapiens
VFDVSHNAV

SEQ ID NO: 144812 - protein, 9 aa, Homo Sapiens
VFDWIEANL

SEQ ID NO: 144813 - protein, 9 aa, Homo Sapiens
VFDYSINSV

SEQ ID NO: 144814 - protein, 9 aa, Homo Sapiens
VFEDLSVTL

SEQ ID NO: 144815 - protein, 9 aa, Homo Sapiens
VFEDVAIHF

SEQ ID NO: 144816 - protein, 9 aa, Homo Sapiens
VFEDVAVYF

SEQ ID NO: 144817 - protein, 9 aa, Homo Sapiens
VFEHDSVEL

SEQ ID NO: 144818 - protein, 9 aa, Homo Sapiens
VFENIVAVL

SEQ ID NO: 144819 - protein, 9 aa, Homo Sapiens
VFEPSWAEF

SEQ ID NO: 144820 - protein, 9 aa, Homo Sapiens
VFEPSWEEF

SEQ ID NO: 144821 - protein, 9 aa, Homo Sapiens
VFEPTIVKV

SEQ ID NO: 144822 - protein, 9 aa, Homo Sapiens
VFETLEARM

SEQ ID NO: 144823 - protein, 9 aa, Homo Sapiens
VFEVSLADL

SEQ ID NO: 144824 - protein, 9 aa, Homo Sapiens
VFFLFDHQM

SEQ ID NO: 144825 - protein, 9 aa, Homo Sapiens
VFHCQSAVM

SEQ ID NO: 144826 - protein, 9 aa, Homo Sapiens
VFMDKPEEF

SEQ ID NO: 144827 - protein, 9 aa, Homo Sapiens
VFPDKEVML

SEQ ID NO: 144828 - protein, 9 aa, Homo Sapiens
VFPKEPVEL

SEQ ID NO: 144829 - protein, 9 aa, Homo Sapiens
VFPNNVVFV

SEQ ID NO: 144830 - protein, 9 aa, Homo Sapiens
VFPTTEVLL

SEQ ID NO: 144831 - protein, 9 aa, Homo Sapiens
VFQPSLAVF

SEQ ID NO: 144832 - protein, 9 aa, Homo Sapiens
VFSEMEANF

SEQ ID NO: 144833 - protein, 9 aa, Homo Sapiens
VFSTVVIHF

SEQ ID NO: 144834 - protein, 9 aa, Homo Sapiens
VFVDDLNMP

SEQ ID NO: 144835 - protein, 9 aa, Homo Sapiens
VFYPFVDLI

SEQ ID NO: 144836 - protein, 9 aa, Homo Sapiens
VGDGYVVHL

SEQ ID NO: 144837 - protein, 9 aa, Homo Sapiens
VIDEQPLMF

SEQ ID NO: 144838 - protein, 9 aa, Homo Sapiens
VIPTNVPEL

SEQ ID NO: 144839 - protein, 9 aa, Homo Sapiens
VLDDKLVFV

SEQ ID NO: 144840 - protein, 9 aa, Homo Sapiens
VLDEQLNEF

SEQ ID NO: 144841 - protein, 9 aa, Homo Sapiens
VLDGKIVAL

SEQ ID NO: 144842 - protein, 9 aa, Homo Sapiens
VLDLAETMV

SEQ ID NO: 144843 - protein, 9 aa, Homo Sapiens
VLDLMKVDM

SEQ ID NO: 144844 - protein, 9 aa, Homo Sapiens
VLDNPTPEM

SEQ ID NO: 144845 - protein, 9 aa, Homo Sapiens
VLDPESVEL

SEQ ID NO: 144846 - protein, 9 aa, Homo Sapiens
VLDQVEARL

SEQ ID NO: 144847 - protein, 9 aa, Homo Sapiens
VLDVVERSL

SEQ ID NO: 144848 - protein, 9 aa, Homo Sapiens
VLPNDPVFL

SEQ ID NO: 144849 - protein, 9 aa, Homo Sapiens
VMDLSIVRL

SEQ ID NO: 144850 - protein, 9 aa, Homo Sapiens
VMDSKIVQV

SEQ ID NO: 144851 - protein, 9 aa, Homo Sapiens
VMDVAFVQF

SEQ ID NO: 144852 - protein, 9 aa, Homo Sapiens
VMDVQYNKF

SEQ ID NO: 144853 - protein, 9 aa, Homo Sapiens
VMDVVVKSV

SEQ ID NO: 144854 - protein, 9 aa, Homo Sapiens
VSDHFPVEF

SEQ ID NO: 144855 - protein, 9 aa, Homo Sapiens
VSDPVTVHF

SEQ ID NO: 144856 - protein, 9 aa, Homo Sapiens
VTDDLVCLV

SEQ ID NO: 144857 - protein, 9 aa, Homo Sapiens
VTDGKEVLL

SEQ ID NO: 144858 - protein, 9 aa, Homo Sapiens
VTDPRVVDL

SEQ ID NO: 144859 - protein, 9 aa, Homo Sapiens
VTDVGQILL

SEQ ID NO: 144860 - protein, 9 aa, Homo Sapiens
VTEEFGVHL

SEQ ID NO: 144861 - protein, 9 aa, Homo Sapiens
VVDAIPVFL

SEQ ID NO: 144862 - protein, 9 aa, Homo Sapiens
VVPDHPVLL

SEQ ID NO: 144863 - protein, 9 aa, Homo Sapiens
VWDEVSGQW

SEQ ID NO: 144864 - protein, 9 aa, Homo Sapiens
VWDHGGRIF

SEQ ID NO: 144865 - protein, 9 aa, Homo Sapiens
VWDHQGVEL

SEQ ID NO: 144866 - protein, 9 aa, Homo Sapiens
VWDIVGTEL

SEQ ID NO: 144867 - protein, 9 aa, Homo Sapiens
VWDLHNQTL

SEQ ID NO: 144868 - protein, 9 aa, Homo Sapiens
VWDLRNMGY

SEQ ID NO: 144869 - protein, 9 aa, Homo Sapiens
VWDRFLSTM

SEQ ID NO: 144870 - protein, 9 aa, Homo Sapiens
VWDTKEVQM

SEQ ID NO: 144871 - protein, 9 aa, Homo Sapiens
VWDVIGRSL

SEQ ID NO: 144872 - protein, 9 aa, Homo Sapiens
VWDVPVEEF

SEQ ID NO: 144873 - protein, 9 aa, Homo Sapiens
VWDYAGDNY

SEQ ID NO: 144874 - protein, 9 aa, Homo Sapiens
VWEEMKTTL

SEQ ID NO: 144875 - protein, 9 aa, Homo Sapiens
VWEETIILL

SEQ ID NO: 144876 - protein, 9 aa, Homo Sapiens
VWELLPTTL

SEQ ID NO: 144877 - protein, 9 aa, Homo Sapiens
VWPLLPALL

SEQ ID NO: 144878 - protein, 9 aa, Homo Sapiens
VWPLPPAVL

SEQ ID NO: 144879 - protein, 9 aa, Homo Sapiens
VWPLQIILL

SEQ ID NO: 144880 - protein, 9 aa, Homo Sapiens
VWPSEPSRV

SEQ ID NO: 144881 - protein, 9 aa, Homo Sapiens
VWTELLDVL

SEQ ID NO: 144882 - protein, 9 aa, Homo Sapiens
VYDALNVLM

SEQ ID NO: 144883 - protein, 9 aa, Homo Sapiens
VYDELRQCI

SEQ ID NO: 144884 - protein, 9 aa, Homo Sapiens
VYDFVGLLV

SEQ ID NO: 144885 - protein, 9 aa, Homo Sapiens
VYDGKIYTL

SEQ ID NO: 144886 - protein, 9 aa, Homo Sapiens
VYDIAQVNL

SEQ ID NO: 144887 - protein, 9 aa, Homo Sapiens
VYDLGGGTF

SEQ ID NO: 144888 - protein, 9 aa, Homo Sapiens
VYDLLHCLV

SEQ ID NO: 144889 - protein, 9 aa, Homo Sapiens
VYDLLKNHL

SEQ ID NO: 144890 - protein, 9 aa, Homo Sapiens
VYDLLKTNL

SEQ ID NO: 144891 - protein, 9 aa, Homo Sapiens
VYDLSIRGF

SEQ ID NO: 144892 - protein, 9 aa, Homo Sapiens
VYDLSKGLA

SEQ ID NO: 144893 - protein, 9 aa, Homo Sapiens
VYDMNLREM

SEQ ID NO: 144894 - protein, 9 aa, Homo Sapiens
VYDPATETW

SEQ ID NO: 144895 - protein, 9 aa, Homo Sapiens
VYDPLFSQL

SEQ ID NO: 144896 - protein, 9 aa, Homo Sapiens
VYDPSLKTL

SEQ ID NO: 144897 - protein, 9 aa, Homo Sapiens
VYDQVVEDL

SEQ ID NO: 144898 - protein, 9 aa, Homo Sapiens
VYDSPLCRL

SEQ ID NO: 144899 - protein, 9 aa, Homo Sapiens
VYDTNPAKF

SEQ ID NO: 144900 - protein, 9 aa, Homo Sapiens
VYDTVFKHF

SEQ ID NO: 144901 - protein, 9 aa, Homo Sapiens
VYDVRQAYV

SEQ ID NO: 144902 - protein, 9 aa, Homo Sapiens
VYDVTPPEL

SEQ ID NO: 144903 - protein, 9 aa, Homo Sapiens
VYDVVEEKL

SEQ ID NO: 144904 - protein, 9 aa, Homo Sapiens
VYDVVELKF

SEQ ID NO: 144905 - protein, 9 aa, Homo Sapiens
VYQEMPAQL

SEQ ID NO: 144906 - protein, 9 aa, Homo Sapiens
WFDGKLVTV

SEQ ID NO: 144907 - protein, 9 aa, Homo Sapiens
WFDNQIHEA

SEQ ID NO: 144908 - protein, 9 aa, Homo Sapiens
WFDPAIFTI

SEQ ID NO: 144909 - protein, 9 aa, Homo Sapiens
WFDYNCIHV

SEQ ID NO: 144910 - protein, 9 aa, Homo Sapiens
WFEAQVVRV

SEQ ID NO: 144911 - protein, 9 aa, Homo Sapiens
WYDPKVTRV

SEQ ID NO: 144912 - protein, 9 aa, Homo Sapiens
WYDPNASLL

SEQ ID NO: 144913 - protein, 9 aa, Homo Sapiens
YCDERITEL

SEQ ID NO: 144914 - protein, 9 aa, Homo Sapiens
YFDAIPVTM

SEQ ID NO: 144915 - protein, 9 aa, Homo Sapiens
YFDALYNIM

SEQ ID NO: 144916 - protein, 9 aa, Homo Sapiens
YFDDALEDF

SEQ ID NO: 144917 - protein, 9 aa, Homo Sapiens
YFDDCMQLL

SEQ ID NO: 144918 - protein, 9 aa, Homo Sapiens
YFDDLKGEM

SEQ ID NO: 144919 - protein, 9 aa, Homo Sapiens
YFDDSNVSL

SEQ ID NO: 144920 - protein, 9 aa, Homo Sapiens
YFDEILNKL

SEQ ID NO: 144921 - protein, 9 aa, Homo Sapiens
YFDEKELEL

SEQ ID NO: 144922 - protein, 9 aa, Homo Sapiens
YFDEPVELR

SEQ ID NO: 144923 - protein, 9 aa, Homo Sapiens
YFDESFFHF

SEQ ID NO: 144924 - protein, 9 aa, Homo Sapiens
YFDGDLSKV

SEQ ID NO: 144925 - protein, 9 aa, Homo Sapiens
YFDKELIQL

SEQ ID NO: 144926 - protein, 9 aa, Homo Sapiens
YFDLAADVL

SEQ ID NO: 144927 - protein, 9 aa, Homo Sapiens
YFDLLGELM

SEQ ID NO: 144928 - protein, 9 aa, Homo Sapiens
YFDLPGALL

SEQ ID NO: 144929 - protein, 9 aa, Homo Sapiens
YFDLQTHVI

SEQ ID NO: 144930 - protein, 9 aa, Homo Sapiens
YFDLTCQLL

SEQ ID NO: 144931 - protein, 9 aa, Homo Sapiens
YFDMGAAVL

SEQ ID NO: 144932 - protein, 9 aa, Homo Sapiens
YFDNILNSF

SEQ ID NO: 144933 - protein, 9 aa, Homo Sapiens
YFDPANGKF

SEQ ID NO: 144934 - protein, 9 aa, Homo Sapiens
YFDPQYFEF

SEQ ID NO: 144935 - protein, 9 aa, Homo Sapiens
YFDPTIVSV

SEQ ID NO: 144936 - protein, 9 aa, Homo Sapiens
YFDQVLVNI

SEQ ID NO: 144937 - protein, 9 aa, Homo Sapiens
YFDSGDYNM

SEQ ID NO: 144938 - protein, 9 aa, Homo Sapiens
YFDTVPVAA

SEQ ID NO: 144939 - protein, 9 aa, Homo Sapiens
YFDVEPFVF

SEQ ID NO: 144940 - protein, 9 aa, Homo Sapiens
YFDVGLHNF

SEQ ID NO: 144941 - protein, 9 aa, Homo Sapiens
YFDVSHEHL

SEQ ID NO: 144942 - protein, 9 aa, Homo Sapiens
YFDWGPGEM

SEQ ID NO: 144943 - protein, 9 aa, Homo Sapiens
YFEAMFRSF

SEQ ID NO: 144944 - protein, 9 aa, Homo Sapiens
YFEDKLTEI

SEQ ID NO: 144945 - protein, 9 aa, Homo Sapiens
YFEDVANAM

SEQ ID NO: 144946 - protein, 9 aa, Homo Sapiens
YFEELITML

SEQ ID NO: 144947 - protein, 9 aa, Homo Sapiens
YFEGKQVSV

SEQ ID NO: 144948 - protein, 9 aa, Homo Sapiens
YFEGSIYEI

SEQ ID NO: 144949 - protein, 9 aa, Homo Sapiens
YFELVQHEY

SEQ ID NO: 144950 - protein, 9 aa, Homo Sapiens
YFENLLSHF

SEQ ID NO: 144951 - protein, 9 aa, Homo Sapiens
YFESVRTFV

SEQ ID NO: 144952 - protein, 9 aa, Homo Sapiens
YFEYFGPDF

SEQ ID NO: 144953 - protein, 9 aa, Homo Sapiens
YFFTWDTEY

SEQ ID NO: 144954 - protein, 9 aa, Homo Sapiens
YFHEALRAF

SEQ ID NO: 144955 - protein, 9 aa, Homo Sapiens
YFIKPPVYV

SEQ ID NO: 144956 - protein, 9 aa, Homo Sapiens
YFISHVLAF

SEQ ID NO: 144957 - protein, 9 aa, Homo Sapiens
YFLPDTAHF

SEQ ID NO: 144958 - protein, 9 aa, Homo Sapiens
YFPDKVALL

SEQ ID NO: 144959 - protein, 9 aa, Homo Sapiens
YFPEEIAKL

SEQ ID NO: 144960 - protein, 9 aa, Homo Sapiens
YFPEFLDML

SEQ ID NO: 144961 - protein, 9 aa, Homo Sapiens
YFPELIANF

SEQ ID NO: 144962 - protein, 9 aa, Homo Sapiens
YFPKKISEL

SEQ ID NO: 144963 - protein, 9 aa, Homo Sapiens
YFPPGIVEV

SEQ ID NO: 144964 - protein, 9 aa, Homo Sapiens
YFPTKPMFV

SEQ ID NO: 144965 - protein, 9 aa, Homo Sapiens
YFWEALNNF

SEQ ID NO: 144966 - protein, 9 aa, Homo Sapiens
YFWEYSEQL

SEQ ID NO: 144967 - protein, 9 aa, Homo Sapiens
YGDCHPVFF

SEQ ID NO: 144968 - protein, 9 aa, Homo Sapiens
YHDKNIVLL

SEQ ID NO: 144969 - protein, 9 aa, Homo Sapiens
YIDDLVVIL

SEQ ID NO: 144970 - protein, 9 aa, Homo Sapiens
YIDLPPPRL

SEQ ID NO: 144971 - protein, 9 aa, Homo Sapiens
YLDEYIARM

SEQ ID NO: 144972 - protein, 9 aa, Homo Sapiens
YLDLILNDF

SEQ ID NO: 144973 - protein, 9 aa, Homo Sapiens
YLDNGVVFV

SEQ ID NO: 144974 - protein, 9 aa, Homo Sapiens
YLPDFLDYF

SEQ ID NO: 144975 - protein, 9 aa, Homo Sapiens
YMDLASRLV

SEQ ID NO: 144976 - protein, 9 aa, Homo Sapiens
YMDTLNIFM

SEQ ID NO: 144977 - protein, 9 aa, Homo Sapiens
YMDYAQARF

SEQ ID NO: 144978 - protein, 9 aa, Homo Sapiens
YVDDGLISL

SEQ ID NO: 144979 - protein, 9 aa, Homo Sapiens
YVPDSPALL

SEQ ID NO: 144980 - protein, 9 aa, Homo Sapiens
YVQDYEDFM

SEQ ID NO: 144981 - protein, 9 aa, Homo Sapiens
YWDCSVCTF

SEQ ID NO: 144982 - protein, 9 aa, Homo Sapiens
YWEEEPAEV

SEQ ID NO: 144983 - protein, 9 aa, Homo Sapiens
YWENKIVRI

SEQ ID NO: 144984 - protein, 9 aa, Homo Sapiens
YWEPAEVFL

SEQ ID NO: 144985 - protein, 9 aa, Homo Sapiens
YYAYLPAKL

SEQ ID NO: 144986 - protein, 9 aa, Homo Sapiens
YYDDYRVQL

SEQ ID NO: 144987 - protein, 9 aa, Homo Sapiens
YYDEIAVPF

SEQ ID NO: 144988 - protein, 9 aa, Homo Sapiens
YYDEIINAL

SEQ ID NO: 144989 - protein, 9 aa, Homo Sapiens
YYDEKVVKL

SEQ ID NO: 144990 - protein, 9 aa, Homo Sapiens
YYDGKVMKL

SEQ ID NO: 144991 - protein, 9 aa, Homo Sapiens
YYDIHRSYL

SEQ ID NO: 144992 - protein, 9 aa, Homo Sapiens
YYDKHFTEF

SEQ ID NO: 144993 - protein, 9 aa, Homo Sapiens
YYDLQEVLL

SEQ ID NO: 144994 - protein, 9 aa, Homo Sapiens
YYDLQGHLF

SEQ ID NO: 144995 - protein, 9 aa, Homo Sapiens
YYDLVKAFM

SEQ ID NO: 144996 - protein, 9 aa, Homo Sapiens
YYDLVRTEI

SEQ ID NO: 144997 - protein, 9 aa, Homo Sapiens
YYDMMDLKV

SEQ ID NO: 144998 - protein, 9 aa, Homo Sapiens
YYDPDYSFL

SEQ ID NO: 144999 - protein, 9 aa, Homo Sapiens
YYDPKHVIF

SEQ ID NO: 145000 - protein, 9 aa, Homo Sapiens
YYDPMISKL

SEQ ID NO: 145001 - protein, 9 aa, Homo Sapiens
YYDVAKILI

SEQ ID NO: 145002 - protein, 9 aa, Homo Sapiens
YYDVAKQLL

SEQ ID NO: 145003 - protein, 9 aa, Homo Sapiens
YYDVEPFLF

SEQ ID NO: 145004 - protein, 9 aa, Homo Sapiens
YYDVPIATL

SEQ ID NO: 145005 - protein, 9 aa, Homo Sapiens
YYDYEIERF

SEQ ID NO: 145006 - protein, 9 aa, Homo Sapiens
YYEEFPINL

SEQ ID NO: 145007 - protein, 9 aa, Homo Sapiens
YYEEQHPEL

SEQ ID NO: 145008 - protein, 9 aa, Homo Sapiens
YYEERTCIL

SEQ ID NO: 145009 - protein, 9 aa, Homo Sapiens
YYELAQVLL

SEQ ID NO: 145010 - protein, 9 aa, Homo Sapiens
YYEVHKELF

SEQ ID NO: 145011 - protein, 9 aa, Homo Sapiens
YYPAFLDMV

SEQ ID NO: 145012 - protein, 9 aa, Homo Sapiens
YYSPSCREF

SEQ ID NO: 145013 - protein, 9 aa, Homo Sapiens
YYTEFPTVL

SEQ ID NO: 145014 - protein, 10 aa, Homo Sapiens
AFDGRPSVAM

SEQ ID NO: 145015 - protein, 10 aa, Homo Sapiens
AFDLVNIHLF

SEQ ID NO: 145016 - protein, 10 aa, Homo Sapiens
AFDSSSAVFL

SEQ ID NO: 145017 - protein, 10 aa, Homo Sapiens
AFDVVERSFL

SEQ ID NO: 145018 - protein, 10 aa, Homo Sapiens
AFYDWDNTEL

SEQ ID NO: 145019 - protein, 10 aa, Homo Sapiens
AWDIFQPLLF

SEQ ID NO: 145020 - protein, 10 aa, Homo Sapiens
AYDDKIYYFF

SEQ ID NO: 145021 - protein, 10 aa, Homo Sapiens
AYDGKDYIAL

SEQ ID NO: 145022 - protein, 10 aa, Homo Sapiens
AYDLASREWL

SEQ ID NO: 145023 - protein, 10 aa, Homo Sapiens
AYDPTAPTLF

SEQ ID NO: 145024 - protein, 10 aa, Homo Sapiens
AYDVPNPVFL

SEQ ID NO: 145025 - protein, 10 aa, Homo Sapiens
AYDVSSFSFF

SEQ ID NO: 145026 - protein, 10 aa, Homo Sapiens
CWDPSPQAYF

SEQ ID NO: 145027 - protein, 10 aa, Homo Sapiens
DFDPALLEFL

SEQ ID NO: 145028 - protein, 10 aa, Homo Sapiens
EAIFDAGTLG

SEQ ID NO: 145029 - protein, 10 aa, Homo Sapiens
EASFDGTFLW

SEQ ID NO: 145030 - protein, 10 aa, Homo Sapiens
EISYAKYGSF

SEQ ID NO: 145031 - protein, 10 aa, Homo Sapiens
FFDAGAAEFL

SEQ ID NO: 145032 - protein, 10 aa, Homo Sapiens
FFDATDRVSF

SEQ ID NO: 145033 - protein, 10 aa, Homo Sapiens
FFDDVGAVTL

SEQ ID NO: 145034 - protein, 10 aa, Homo Sapiens
FFDEMADPDL

SEQ ID NO: 145035 - protein, 10 aa, Homo Sapiens
FFDPNTHENL

SEQ ID NO: 145036 - protein, 10 aa, Homo Sapiens
FFDPSLLHLL

SEQ ID NO: 145037 - protein, 10 aa, Homo Sapiens
FFDSQGQVLL

SEQ ID NO: 145038 - protein, 10 aa, Homo Sapiens
FFDTLPSSEF

SEQ ID NO: 145039 - protein, 10 aa, Homo Sapiens
FFDTNTSVLM

SEQ ID NO: 145040 - protein, 10 aa, Homo Sapiens
FFDVLPVHKF

SEQ ID NO: 145041 - protein, 10 aa, Homo Sapiens
FFDYNYGQYF

SEQ ID NO: 145042 - protein, 10 aa, Homo Sapiens
FFEDEKPALL

SEQ ID NO: 145043 - protein, 10 aa, Homo Sapiens
FFGTHETAFL

SEQ ID NO: 145044 - protein, 10 aa, Homo Sapiens
FLPEAPAELL

SEQ ID NO: 145045 - protein, 10 aa, Homo Sapiens
FMEAIAPPLL

SEQ ID NO: 145046 - protein, 10 aa, Homo Sapiens
FPFDVTKVEV

SEQ ID NO: 145047 - protein, 10 aa, Homo Sapiens
FTDEESRVFL

SEQ ID NO: 145048 - protein, 10 aa, Homo Sapiens
FWDQQEPVIV

SEQ ID NO: 145049 - protein, 10 aa, Homo Sapiens
FWPPYVELLL

SEQ ID NO: 145050 - protein, 10 aa, Homo Sapiens
FYDDREFIYL

SEQ ID NO: 145051 - protein, 10 aa, Homo Sapiens
FYDFFRYVEM

SEQ ID NO: 145052 - protein, 10 aa, Homo Sapiens
FYDLYGGEKF

SEQ ID NO: 145053 - protein, 10 aa, Homo Sapiens
FYDNKGITYL

SEQ ID NO: 145054 - protein, 10 aa, Homo Sapiens
FYDPDTVELM

SEQ ID NO: 145055 - protein, 10 aa, Homo Sapiens
FYDPTAGVVM

SEQ ID NO: 145056 - protein, 10 aa, Homo Sapiens
GPPPPPGKPQ

SEQ ID NO: 145057 - protein, 10 aa, Homo Sapiens
GSFDETCTRF

SEQ ID NO: 145058 - protein, 10 aa, Homo Sapiens
GSFDVADRMF

SEQ ID NO: 145059 - protein, 10 aa, Homo Sapiens
HFDASLSTYF

SEQ ID NO: 145060 - protein, 10 aa, Homo Sapiens
HFDDTVVCLD

SEQ ID NO: 145061 - protein, 10 aa, Homo Sapiens
HFDLASSIFV

SEQ ID NO: 145062 - protein, 10 aa, Homo Sapiens
HFDMNIISML

SEQ ID NO: 145063 - protein, 10 aa, Homo Sapiens
HFDVALGRMV

SEQ ID NO: 145064 - protein, 10 aa, Homo Sapiens
HWDIADATVL

SEQ ID NO: 145065 - protein, 10 aa, Homo Sapiens
HWDPVNGYFF

SEQ ID NO: 145066 - protein, 10 aa, Homo Sapiens
HWDVTEAVFH

SEQ ID NO: 145067 - protein, 10 aa, Homo Sapiens
HYDPATEEFI

SEQ ID NO: 145068 - protein, 10 aa, Homo Sapiens
HYMPPPYASL

SEQ ID NO: 145069 - protein, 10 aa, Homo Sapiens
IFDLQSNTVL

SEQ ID NO: 145070 - protein, 10 aa, Homo Sapiens
IFDRYGEEGL

SEQ ID NO: 145071 - protein, 10 aa, Homo Sapiens
IFDVVDGTYV

SEQ ID NO: 145072 - protein, 10 aa, Homo Sapiens
IGDFSKGYLF

SEQ ID NO: 145073 - protein, 10 aa, Homo Sapiens
ISDFGLATVF

SEQ ID NO: 145074 - protein, 10 aa, Homo Sapiens
IWPEKVLDIL

SEQ ID NO: 145075 - protein, 10 aa, Homo Sapiens
IYDDQGHIHL

SEQ ID NO: 145076 - protein, 10 aa, Homo Sapiens
IYDEAISSFF

SEQ ID NO: 145077 - protein, 10 aa, Homo Sapiens
IYDIYGKRGL

SEQ ID NO: 145078 - protein, 10 aa, Homo Sapiens
IYIQIEHSAI

SEQ ID NO: 145079 - protein, 10 aa, Homo Sapiens
KFDEVLVNHF

SEQ ID NO: 145080 - protein, 10 aa, Homo Sapiens
KFDLAARTLL

SEQ ID NO: 145081 - protein, 10 aa, Homo Sapiens
KFDNIGMNAM

SEQ ID NO: 145082 - protein, 10 aa, Homo Sapiens
KWEWPNPVLL

SEQ ID NO: 145083 - protein, 10 aa, Homo Sapiens
KYDPEEPIYF

SEQ ID NO: 145084 - protein, 10 aa, Homo Sapiens
LFDANKAELF

SEQ ID NO: 145085 - protein, 10 aa, Homo Sapiens
LFDISGRAPL

SEQ ID NO: 145086 - protein, 10 aa, Homo Sapiens
LFDLGVAYGI

SEQ ID NO: 145087 - protein, 10 aa, Homo Sapiens
LFDLTPAKVL

SEQ ID NO: 145088 - protein, 10 aa, Homo Sapiens
LFDPCNSVEF

SEQ ID NO: 145089 - protein, 10 aa, Homo Sapiens
LFDRPMHVKM

SEQ ID NO: 145090 - protein, 10 aa, Homo Sapiens
LFDVLHEPFL

SEQ ID NO: 145091 - protein, 10 aa, Homo Sapiens
LTDMSRPVEL

SEQ ID NO: 145092 - protein, 10 aa, Homo Sapiens
LWDDKGPAKI

SEQ ID NO: 145093 - protein, 10 aa, Homo Sapiens
LWDSAVSHFF

SEQ ID NO: 145094 - protein, 10 aa, Homo Sapiens
LYDELRNLLL

SEQ ID NO: 145095 - protein, 10 aa, Homo Sapiens
LYDLLRNTNF

SEQ ID NO: 145096 - protein, 10 aa, Homo Sapiens
LYDLVTEKMF

SEQ ID NO: 145097 - protein, 10 aa, Homo Sapiens
LYDPCTVMFF

SEQ ID NO: 145098 - protein, 10 aa, Homo Sapiens
LYDQLATICP

SEQ ID NO: 145099 - protein, 10 aa, Homo Sapiens
LYMIPVGAFI

SEQ ID NO: 145100 - protein, 10 aa, Homo Sapiens
LYPEVPPEEF

SEQ ID NO: 145101 - protein, 10 aa, Homo Sapiens
MFDDIGRNFL

SEQ ID NO: 145102 - protein, 10 aa, Homo Sapiens
MFDLTTRLIL

SEQ ID NO: 145103 - protein, 10 aa, Homo Sapiens
MFDVASGRLM

SEQ ID NO: 145104 - protein, 10 aa, Homo Sapiens
MFDVTNATTF

SEQ ID NO: 145105 - protein, 10 aa, Homo Sapiens
NFDEALVDYF

SEQ ID NO: 145106 - protein, 10 aa, Homo Sapiens
NFDPHYPIIL

SEQ ID NO: 145107 - protein, 10 aa, Homo Sapiens
NYDLHDTVSF

SEQ ID NO: 145108 - protein, 10 aa, Homo Sapiens
PASSSLPAFL

SEQ ID NO: 145109 - protein, 10 aa, Homo Sapiens
QFDEGLPPIL

SEQ ID NO: 145110 - protein, 10 aa, Homo Sapiens
QWEDLTPLTF

SEQ ID NO: 145111 - protein, 10 aa, Homo Sapiens
QYDEAISDYF

SEQ ID NO: 145112 - protein, 10 aa, Homo Sapiens
RFDDPGLMLM

SEQ ID NO: 145113 - protein, 10 aa, Homo Sapiens
RFDEISFVNF

SEQ ID NO: 145114 - protein, 10 aa, Homo Sapiens
RFDPLGHYLL

SEQ ID NO: 145115 - protein, 10 aa, Homo Sapiens
RFDSNNVVLI

SEQ ID NO: 145116 - protein, 10 aa, Homo Sapiens
SAPGYLPTSL

SEQ ID NO: 145117 - protein, 10 aa, Homo Sapiens
SFDETVTHFI

SEQ ID NO: 145118 - protein, 10 aa, Homo Sapiens
SFDIGDQPVF

SEQ ID NO: 145119 - protein, 10 aa, Homo Sapiens
SFDKGPFATF

SEQ ID NO: 145120 - protein, 10 aa, Homo Sapiens
SLPAGDALYL

SEQ ID NO: 145121 - protein, 10 aa, Homo Sapiens
SWDDSSDSYW

SEQ ID NO: 145122 - protein, 10 aa, Homo Sapiens
SYDPTIENTF

SEQ ID NO: 145123 - protein, 10 aa, Homo Sapiens
SYDPVLNPVL

SEQ ID NO: 145124 - protein, 10 aa, Homo Sapiens
SYDVLHLVEF

SEQ ID NO: 145125 - protein, 10 aa, Homo Sapiens
TACVDIPQLL

SEQ ID NO: 145126 - protein, 10 aa, Homo Sapiens
TFDAGAGIAL

SEQ ID NO: 145127 - protein, 10 aa, Homo Sapiens
TFDETVSTYV

SEQ ID NO: 145128 - protein, 10 aa, Homo Sapiens
TFDILQDLEF

SEQ ID NO: 145129 - protein, 10 aa, Homo Sapiens
TWDYVAPFLE

SEQ ID NO: 145130 - protein, 10 aa, Homo Sapiens
TYDDRAYSSF

SEQ ID NO: 145131 - protein, 10 aa, Homo Sapiens
TYDLMSSAYL

SEQ ID NO: 145132 - protein, 10 aa, Homo Sapiens
TYDTSFLDFL

SEQ ID NO: 145133 - protein, 10 aa, Homo Sapiens
TYDYGGFTMM

SEQ ID NO: 145134 - protein, 10 aa, Homo Sapiens
VFDAMFNGGM

SEQ ID NO: 145135 - protein, 10 aa, Homo Sapiens
VFDASSIQYF

SEQ ID NO: 145136 - protein, 10 aa, Homo Sapiens
VFDDGRYVYL

SEQ ID NO: 145137 - protein, 10 aa, Homo Sapiens
VFDEADRMFD

SEQ ID NO: 145138 - protein, 10 aa, Homo Sapiens
VFDEAILAAL

SEQ ID NO: 145139 - protein, 10 aa, Homo Sapiens
VFDEAIRAVL

SEQ ID NO: 145140 - protein, 10 aa, Homo Sapiens
VFDETGHFVL

SEQ ID NO: 145141 - protein, 10 aa, Homo Sapiens
VFDFPDLNRF

SEQ ID NO: 145142 - protein, 10 aa, Homo Sapiens
VFDLNDESKW

SEQ ID NO: 145143 - protein, 10 aa, Homo Sapiens
VFDLTDLDVL

SEQ ID NO: 145144 - protein, 10 aa, Homo Sapiens
VFDMAGEIGF

SEQ ID NO: 145145 - protein, 10 aa, Homo Sapiens
VFDMGAEVGF

SEQ ID NO: 145146 - protein, 10 aa, Homo Sapiens
VFDPVQKTLL

SEQ ID NO: 145147 - protein, 10 aa, Homo Sapiens
VFDQPQEYFM

SEQ ID NO: 145148 - protein, 10 aa, Homo Sapiens
VFDTAIAHLF

SEQ ID NO: 145149 - protein, 10 aa, Homo Sapiens
VFDTSIAQLF

SEQ ID NO: 145150 - protein, 10 aa, Homo Sapiens
VFDTTFQSHL

SEQ ID NO: 145151 - protein, 10 aa, Homo Sapiens
VFDVFLVEGY

SEQ ID NO: 145152 - protein, 10 aa, Homo Sapiens
VFDVGGLLED

SEQ ID NO: 145153 - protein, 10 aa, Homo Sapiens
VFDVLDGEEM

SEQ ID NO: 145154 - protein, 10 aa, Homo Sapiens
VFDVTAPNTF

SEQ ID NO: 145155 - protein, 10 aa, Homo Sapiens
VFDVTERTAL

SEQ ID NO: 145156 - protein, 10 aa, Homo Sapiens
VFDVTKGSKF

SEQ ID NO: 145157 - protein, 10 aa, Homo Sapiens
VTDEFLSDFL

SEQ ID NO: 145158 - protein, 10 aa, Homo Sapiens
VTDEPVYIDL

SEQ ID NO: 145159 - protein, 10 aa, Homo Sapiens
VWDIFQPLLF

SEQ ID NO: 145160 - protein, 10 aa, Homo Sapiens
VWDLAQQVVL

SEQ ID NO: 145161 - protein, 10 aa, Homo Sapiens
VWDYAGDNYV

SEQ ID NO: 145162 - protein, 10 aa, Homo Sapiens
VYDDGKYVYV

SEQ ID NO: 145163 - protein, 10 aa, Homo Sapiens
VYDDMAFRYL

SEQ ID NO: 145164 - protein, 10 aa, Homo Sapiens
VYDGEHLGSF

SEQ ID NO: 145165 - protein, 10 aa, Homo Sapiens
VYDIADHPDF

SEQ ID NO: 145166 - protein, 10 aa, Homo Sapiens
VYDITNVNSF

SEQ ID NO: 145167 - protein, 10 aa, Homo Sapiens
VYDPSLKTLL

SEQ ID NO: 145168 - protein, 10 aa, Homo Sapiens
VYDPYKPYQL

SEQ ID NO: 145169 - protein, 10 aa, Homo Sapiens
VYDSQGLLIF

SEQ ID NO: 145170 - protein, 10 aa, Homo Sapiens
VYDVTDQESF

SEQ ID NO: 145171 - protein, 10 aa, Homo Sapiens
VYDVTKMTSF

SEQ ID NO: 145172 - protein, 10 aa, Homo Sapiens
YFDAIPVTMT

SEQ ID NO: 145173 - protein, 10 aa, Homo Sapiens
YFYDRRRIYL

SEQ ID NO: 145174 - protein, 10 aa, Homo Sapiens
YIDFMGTDAA

SEQ ID NO: 145175 - protein, 10 aa, Homo Sapiens
YVDGPASTAF

SEQ ID NO: 145176 - protein, 10 aa, Homo Sapiens
YWDGEKETYV

SEQ ID NO: 145177 - protein, 10 aa, Homo Sapiens
YWDPLLGTCM

SEQ ID NO: 145178 - protein, 10 aa, Homo Sapiens
YWPTYTPMEV

SEQ ID NO: 145179 - protein, 10 aa, Homo Sapiens
YWPTYVPMEV

SEQ ID NO: 145180 - protein, 10 aa, Homo Sapiens
YYDDLKYRYF

SEQ ID NO: 145181 - protein, 10 aa, Homo Sapiens
YYDEKVVKLL

SEQ ID NO: 145182 - protein, 10 aa, Homo Sapiens
YYDLYGGEKF

SEQ ID NO: 145183 - protein, 10 aa, Homo Sapiens
YYDPKHVIFS

SEQ ID NO: 145184 - protein, 10 aa, Homo Sapiens
YYDPQEEVYL

SEQ ID NO: 145185 - protein, 11 aa, Homo Sapiens
AFDVVERSFLE

SEQ ID NO: 145186 - protein, 11 aa, Homo Sapiens
AGDLDKFISEF

SEQ ID NO: 145187 - protein, 11 aa, Homo Sapiens
ASEQILLATAH

SEQ ID NO: 145188 - protein, 11 aa, Homo Sapiens
AVVQDPALKPL

SEQ ID NO: 145189 - protein, 11 aa, Homo Sapiens
AYDDLGNSGHF

SEQ ID NO: 145190 - protein, 11 aa, Homo Sapiens
AYDIGNHFNEF

SEQ ID NO: 145191 - protein, 11 aa, Homo Sapiens
CHAVSAPYASL

SEQ ID NO: 145192 - protein, 11 aa, Homo Sapiens
FAYDGKDYIAL

SEQ ID NO: 145193 - protein, 11 aa, Homo Sapiens
FFDDLGDELLF

SEQ ID NO: 145194 - protein, 11 aa, Homo Sapiens
FFDEMADPDLL

SEQ ID NO: 145195 - protein, 11 aa, Homo Sapiens
FFDHSGTLVMD

SEQ ID NO: 145196 - protein, 11 aa, Homo Sapiens
FFDPASIMDES

SEQ ID NO: 145197 - protein, 11 aa, Homo Sapiens
FFDPDTNIVYL

SEQ ID NO: 145198 - protein, 11 aa, Homo Sapiens
FFDPSLLHLLY

SEQ ID NO: 145199 - protein, 11 aa, Homo Sapiens
FYDETYDYGGF

SEQ ID NO: 145200 - protein, 11 aa, Homo Sapiens
FYDPDTSIIYL

SEQ ID NO: 145201 - protein, 11 aa, Homo Sapiens
FYDPTAGVVML

SEQ ID NO: 145202 - protein, 11 aa, Homo Sapiens
FYEPQKGSIYL

SEQ ID NO: 145203 - protein, 11 aa, Homo Sapiens
GDFGAPALPMA

SEQ ID NO: 145204 - protein, 11 aa, Homo Sapiens
GGSFDVADRMF

SEQ ID NO: 145205 - protein, 11 aa, Homo Sapiens
GPPPPPPGKPQ

SEQ ID NO: 145206 - protein, 11 aa, Homo Sapiens
HFDDIGPSVVM

SEQ ID NO: 145207 - protein, 11 aa, Homo Sapiens
HFDLASSIFVA

SEQ ID NO: 145208 - protein, 11 aa, Homo Sapiens
HFDTQNNISTM

SEQ ID NO: 145209 - protein, 11 aa, Homo Sapiens
HWDPEYSDVKL

SEQ ID NO: 145210 - protein, 11 aa, Homo Sapiens
IFDLQSNTVLA

SEQ ID NO: 145211 - protein, 11 aa, Homo Sapiens
IWDPHNGDILM

SEQ ID NO: 145212 - protein, 11 aa, Homo Sapiens
IYDFIGEFMKA

SEQ ID NO: 145213 - protein, 11 aa, Homo Sapiens
IYDPQEGAVVV

SEQ ID NO: 145214 - protein, 11 aa, Homo Sapiens
IYDRDFSYNYF

SEQ ID NO: 145215 - protein, 11 aa, Homo Sapiens
LYDPASGTISL

SEQ ID NO: 145216 - protein, 11 aa, Homo Sapiens
MAPSETQFSHL

SEQ ID NO: 145217 - protein, 11 aa, Homo Sapiens
NFDVGHVPIRL

SEQ ID NO: 145218 - protein, 11 aa, Homo Sapiens
SFDEMLPGTHF

SEQ ID NO: 145219 - protein, 11 aa, Homo Sapiens
SFDVTQSPFFP

SEQ ID NO: 145220 - protein, 11 aa, Homo Sapiens
SYDAPSDFINF

SEQ ID NO: 145221 - protein, 11 aa, Homo Sapiens
TFDVAPSRLDF

SEQ ID NO: 145222 - protein, 11 aa, Homo Sapiens
VFDDSGVFDQT

SEQ ID NO: 145223 - protein, 11 aa, Homo Sapiens
VFDEAIRAVLC

SEQ ID NO: 145224 - protein, 11 aa, Homo Sapiens
VFDFGRRPVLL

SEQ ID NO: 145225 - protein, 11 aa, Homo Sapiens
VFDLAWVPGEL

SEQ ID NO: 145226 - protein, 11 aa, Homo Sapiens
VFDLNTPVHTF

SEQ ID NO: 145227 - protein, 11 aa, Homo Sapiens
VFDTAPTGHTL

SEQ ID NO: 145228 - protein, 11 aa, Homo Sapiens
VTAPKNVSDII

SEQ ID NO: 145229 - protein, 11 aa, Homo Sapiens
VWDEGCAVVHL

SEQ ID NO: 145230 - protein, 11 aa, Homo Sapiens
VWDLFPEADKV

SEQ ID NO: 145231 - protein, 11 aa, Homo Sapiens
VWNAQEAQADF

SEQ ID NO: 145232 - protein, 11 aa, Homo Sapiens
VYDIDNKTIEL

SEQ ID NO: 145233 - protein, 11 aa, Homo Sapiens
VYDNIGILGNF

SEQ ID NO: 145234 - protein, 11 aa, Homo Sapiens
VYDPSPVSPFI

SEQ ID NO: 145235 - protein, 11 aa, Homo Sapiens
YFDAIPVTMTM

SEQ ID NO: 145236 - protein, 11 aa, Homo Sapiens
YWIDEPDVLVM

SEQ ID NO: 145237 - protein, 8 aa, Homo Sapiens
AADAGTFL

SEQ ID NO: 145238 - protein, 8 aa, Homo Sapiens
AADEPVYI

SEQ ID NO: 145239 - protein, 8 aa, Homo Sapiens
AADGFSLL

SEQ ID NO: 145240 - protein, 8 aa, Homo Sapiens
AADGVIRL

SEQ ID NO: 145241 - protein, 8 aa, Homo Sapiens
AADIAVQL

SEQ ID NO: 145242 - protein, 8 aa, Homo Sapiens
AADKVVFL

SEQ ID NO: 145243 - protein, 8 aa, Homo Sapiens
AADNQIYI

SEQ ID NO: 145244 - protein, 8 aa, Homo Sapiens
AADSAVRL

SEQ ID NO: 145245 - protein, 8 aa, Homo Sapiens
AADTVVIF

SEQ ID NO: 145246 - protein, 8 aa, Homo Sapiens
AADVLVYL

SEQ ID NO: 145247 - protein, 8 aa, Homo Sapiens
AIDEYQIL

SEQ ID NO: 145248 - protein, 8 aa, Homo Sapiens
AIDSPVSF

SEQ ID NO: 145249 - protein, 8 aa, Homo Sapiens
ASDAAAFL

SEQ ID NO: 145250 - protein, 8 aa, Homo Sapiens
ATDFFTVL

SEQ ID NO: 145251 - protein, 8 aa, Homo Sapiens
ATDIFSYL

SEQ ID NO: 145252 - protein, 8 aa, Homo Sapiens
ATDLAYYL

SEQ ID NO: 145253 - protein, 8 aa, Homo Sapiens
ATDLVVCV

SEQ ID NO: 145254 - protein, 8 aa, Homo Sapiens
ATDVAAFL

SEQ ID NO: 145255 - protein, 8 aa, Homo Sapiens
AVDEPQML

SEQ ID NO: 145256 - protein, 8 aa, Homo Sapiens
DLPNGRVC

SEQ ID NO: 145257 - protein, 8 aa, Homo Sapiens
EVGPDGVR

SEQ ID NO: 145258 - protein, 8 aa, Homo Sapiens
FADAITEL

SEQ ID NO: 145259 - protein, 8 aa, Homo Sapiens
FADATVEL

SEQ ID NO: 145260 - protein, 8 aa, Homo Sapiens
FADAVQEL

SEQ ID NO: 145261 - protein, 8 aa, Homo Sapiens
FADDMQEF

SEQ ID NO: 145262 - protein, 8 aa, Homo Sapiens
FADEFIFL

SEQ ID NO: 145263 - protein, 8 aa, Homo Sapiens
FADGFVLV

SEQ ID NO: 145264 - protein, 8 aa, Homo Sapiens
FADGVILL

SEQ ID NO: 145265 - protein, 8 aa, Homo Sapiens
FADGVYLV

SEQ ID NO: 145266 - protein, 8 aa, Homo Sapiens
FADISNLL

SEQ ID NO: 145267 - protein, 8 aa, Homo Sapiens
FADLCSSL

SEQ ID NO: 145268 - protein, 8 aa, Homo Sapiens
FADLHAYL

SEQ ID NO: 145269 - protein, 8 aa, Homo Sapiens
FADLPALF

SEQ ID NO: 145270 - protein, 8 aa, Homo Sapiens
FADQPIQI

SEQ ID NO: 145271 - protein, 8 aa, Homo Sapiens
FADSSYLL

SEQ ID NO: 145272 - protein, 8 aa, Homo Sapiens
FADVAVYF

SEQ ID NO: 145273 - protein, 8 aa, Homo Sapiens
FADVETHF

SEQ ID NO: 145274 - protein, 8 aa, Homo Sapiens
FADVIVLF

SEQ ID NO: 145275 - protein, 8 aa, Homo Sapiens
FADVSVKF

SEQ ID NO: 145276 - protein, 8 aa, Homo Sapiens
FAERVTSL

SEQ ID NO: 145277 - protein, 8 aa, Homo Sapiens
FFENHPYF

SEQ ID NO: 145278 - protein, 8 aa, Homo Sapiens
FFESFGDL

SEQ ID NO: 145279 - protein, 8 aa, Homo Sapiens
FGDACVYL

SEQ ID NO: 145280 - protein, 8 aa, Homo Sapiens
FIDAVYKL

SEQ ID NO: 145281 - protein, 8 aa, Homo Sapiens
FIDDLADL

SEQ ID NO: 145282 - protein, 8 aa, Homo Sapiens
FIDEEVLM

SEQ ID NO: 145283 - protein, 8 aa, Homo Sapiens
FIDEQQIL

SEQ ID NO: 145284 - protein, 8 aa, Homo Sapiens
FIDEYIVL

SEQ ID NO: 145285 - protein, 8 aa, Homo Sapiens
FIDKPVCF

SEQ ID NO: 145286 - protein, 8 aa, Homo Sapiens
FIDKQTNL

SEQ ID NO: 145287 - protein, 8 aa, Homo Sapiens
FIDQPQFL

SEQ ID NO: 145288 - protein, 8 aa, Homo Sapiens
FIDTTSKF

SEQ ID NO: 145289 - protein, 8 aa, Homo Sapiens
FLDEEVKL

SEQ ID NO: 145290 - protein, 8 aa, Homo Sapiens
FLDKPTLL

SEQ ID NO: 145291 - protein, 8 aa, Homo Sapiens
FLDVAGLL

SEQ ID NO: 145292 - protein, 8 aa, Homo Sapiens
FLDVVSKL

SEQ ID NO: 145293 - protein, 8 aa, Homo Sapiens
FNDTFVHV

SEQ ID NO: 145294 - protein, 8 aa, Homo Sapiens
FQDAYVLL

SEQ ID NO: 145295 - protein, 8 aa, Homo Sapiens
FSDGAVSL

SEQ ID NO: 145296 - protein, 8 aa, Homo Sapiens
FSDVEAHF

SEQ ID NO: 145297 - protein, 8 aa, Homo Sapiens
FTDERIFM

SEQ ID NO: 145298 - protein, 8 aa, Homo Sapiens
FTDFHIDF

SEQ ID NO: 145299 - protein, 8 aa, Homo Sapiens
FTDGSVTL

SEQ ID NO: 145300 - protein, 8 aa, Homo Sapiens
FTDGTIRL

SEQ ID NO: 145301 - protein, 8 aa, Homo Sapiens
FTDLCVYF

SEQ ID NO: 145302 - protein, 8 aa, Homo Sapiens
FTDLSSRF

SEQ ID NO: 145303 - protein, 8 aa, Homo Sapiens
FTDNAVAF

SEQ ID NO: 145304 - protein, 8 aa, Homo Sapiens
FTDTPLQI

SEQ ID NO: 145305 - protein, 8 aa, Homo Sapiens
FTDTSIIL

SEQ ID NO: 145306 - protein, 8 aa, Homo Sapiens
FTDTVIRI

SEQ ID NO: 145307 - protein, 8 aa, Homo Sapiens
FTDVEASL

SEQ ID NO: 145308 - protein, 8 aa, Homo Sapiens
FTEDRIWL

SEQ ID NO: 145309 - protein, 8 aa, Homo Sapiens
FVDDETKL

SEQ ID NO: 145310 - protein, 8 aa, Homo Sapiens
FVDGVSTV

SEQ ID NO: 145311 - protein, 8 aa, Homo Sapiens
FVDNHVEL

SEQ ID NO: 145312 - protein, 8 aa, Homo Sapiens
FVDQFVEL

SEQ ID NO: 145313 - protein, 8 aa, Homo Sapiens
FVDSTFYL

SEQ ID NO: 145314 - protein, 8 aa, Homo Sapiens
FVDTEIRL

SEQ ID NO: 145315 - protein, 8 aa, Homo Sapiens
FVDTVVAL

SEQ ID NO: 145316 - protein, 8 aa, Homo Sapiens
GADYAVYI

SEQ ID NO: 145317 - protein, 8 aa, Homo Sapiens
GDLPNGRV

SEQ ID NO: 145318 - protein, 8 aa, Homo Sapiens
HTDLPVSV

SEQ ID NO: 145319 - protein, 8 aa, Homo Sapiens
HTDTTVKF

SEQ ID NO: 145320 - protein, 8 aa, Homo Sapiens
HTDTVVNF

SEQ ID NO: 145321 - protein, 8 aa, Homo Sapiens
HVDVVVNF

SEQ ID NO: 145322 - protein, 8 aa, Homo Sapiens
IADAHGLL

SEQ ID NO: 145323 - protein, 8 aa, Homo Sapiens
IADDFAAF

SEQ ID NO: 145324 - protein, 8 aa, Homo Sapiens
IADFFTEL

SEQ ID NO: 145325 - protein, 8 aa, Homo Sapiens
IADKVVFL

SEQ ID NO: 145326 - protein, 8 aa, Homo Sapiens
IADLAHLL

SEQ ID NO: 145327 - protein, 8 aa, Homo Sapiens
IADLWVVL

SEQ ID NO: 145328 - protein, 8 aa, Homo Sapiens
IADNIIFL

SEQ ID NO: 145329 - protein, 8 aa, Homo Sapiens
IADQITLL

SEQ ID NO: 145330 - protein, 8 aa, Homo Sapiens
IADRLVLL

SEQ ID NO: 145331 - protein, 8 aa, Homo Sapiens
IADRPLYL

SEQ ID NO: 145332 - protein, 8 aa, Homo Sapiens
IADSFQVI

SEQ ID NO: 145333 - protein, 8 aa, Homo Sapiens
IADVSTGL

SEQ ID NO: 145334 - protein, 8 aa, Homo Sapiens
IEDAFEVL

SEQ ID NO: 145335 - protein, 8 aa, Homo Sapiens
IEGIPVTL

SEQ ID NO: 145336 - protein, 8 aa, Homo Sapiens
IGESANLL

SEQ ID NO: 145337 - protein, 8 aa, Homo Sapiens
IIDCVVRI

SEQ ID NO: 145338 - protein, 8 aa, Homo Sapiens
IIDDRVIL

SEQ ID NO: 145339 - protein, 8 aa, Homo Sapiens
IIDKEVSL

SEQ ID NO: 145340 - protein, 8 aa, Homo Sapiens
IIDKYIKL

SEQ ID NO: 145341 - protein, 8 aa, Homo Sapiens
IIDTPGIL

SEQ ID NO: 145342 - protein, 8 aa, Homo Sapiens
IIDYEVSI

SEQ ID NO: 145343 - protein, 8 aa, Homo Sapiens
INDTVVRF

SEQ ID NO: 145344 - protein, 8 aa, Homo Sapiens
ISDFAVFL

SEQ ID NO: 145345 - protein, 8 aa, Homo Sapiens
ISDYAVKI

SEQ ID NO: 145346 - protein, 8 aa, Homo Sapiens
ITDITALL

SEQ ID NO: 145347 - protein, 8 aa, Homo Sapiens
ITDLISEL

SEQ ID NO: 145348 - protein, 8 aa, Homo Sapiens
ITDLPIKL

SEQ ID NO: 145349 - protein, 8 aa, Homo Sapiens
ITDLYTDL

SEQ ID NO: 145350 - protein, 8 aa, Homo Sapiens
ITDSPVVV

SEQ ID NO: 145351 - protein, 8 aa, Homo Sapiens
ITIDTSYL

SEQ ID NO: 145352 - protein, 8 aa, Homo Sapiens
IVDGIYRL

SEQ ID NO: 145353 - protein, 8 aa, Homo Sapiens
IVDKRVLI

SEQ ID NO: 145354 - protein, 8 aa, Homo Sapiens
IVDRPVTL

SEQ ID NO: 145355 - protein, 8 aa, Homo Sapiens
IVDRVSYL

SEQ ID NO: 145356 - protein, 8 aa, Homo Sapiens
IVDVPAHL

SEQ ID NO: 145357 - protein, 8 aa, Homo Sapiens
KIDKEYLL

SEQ ID NO: 145358 - protein, 8 aa, Homo Sapiens
KSDVPVYL

SEQ ID NO: 145359 - protein, 8 aa, Homo Sapiens
KTDEFQLH

SEQ ID NO: 145360 - protein, 8 aa, Homo Sapiens
LADAVTWL

SEQ ID NO: 145361 - protein, 8 aa, Homo Sapiens
LADAVVKI

SEQ ID NO: 145362 - protein, 8 aa, Homo Sapiens
LADFAELI

SEQ ID NO: 145363 - protein, 8 aa, Homo Sapiens
LADHPVMI

SEQ ID NO: 145364 - protein, 8 aa, Homo Sapiens
LADIAQKL

SEQ ID NO: 145365 - protein, 8 aa, Homo Sapiens
LADIFTKL

SEQ ID NO: 145366 - protein, 8 aa, Homo Sapiens
LADKSVLV

SEQ ID NO: 145367 - protein, 8 aa, Homo Sapiens
LADKVYFL

SEQ ID NO: 145368 - protein, 8 aa, Homo Sapiens
LADLPQQL

SEQ ID NO: 145369 - protein, 8 aa, Homo Sapiens
LADQWQFL

SEQ ID NO: 145370 - protein, 8 aa, Homo Sapiens
LADVATVL

SEQ ID NO: 145371 - protein, 8 aa, Homo Sapiens
LADVETFV

SEQ ID NO: 145372 - protein, 8 aa, Homo Sapiens
LADVGSFL

SEQ ID NO: 145373 - protein, 8 aa, Homo Sapiens
LADYIKVF

SEQ ID NO: 145374 - protein, 8 aa, Homo Sapiens
LIDKPTNL

SEQ ID NO: 145375 - protein, 8 aa, Homo Sapiens
LIEKTNEE

SEQ ID NO: 145376 - protein, 8 aa, Homo Sapiens
LSDHHVYL

SEQ ID NO: 145377 - protein, 8 aa, Homo Sapiens
LTDDHVQF

SEQ ID NO: 145378 - protein, 8 aa, Homo Sapiens
LTDYVAFL

SEQ ID NO: 145379 - protein, 8 aa, Homo Sapiens
LVDHVAEL

SEQ ID NO: 145380 - protein, 8 aa, Homo Sapiens
LVDTTVEL

SEQ ID NO: 145381 - protein, 8 aa, Homo Sapiens
LVSMVVLF

SEQ ID NO: 145382 - protein, 8 aa, Homo Sapiens
MADALQYL

SEQ ID NO: 145383 - protein, 8 aa, Homo Sapiens
MIDFPQMV

SEQ ID NO: 145384 - protein, 8 aa, Homo Sapiens
MTDFAIQF

SEQ ID NO: 145385 - protein, 8 aa, Homo Sapiens
MTDVLVFL

SEQ ID NO: 145386 - protein, 8 aa, Homo Sapiens
NADIVTLL

SEQ ID NO: 145387 - protein, 8 aa, Homo Sapiens
NFDNPVYL

SEQ ID NO: 145388 - protein, 8 aa, Homo Sapiens
NIDDVVRF

SEQ ID NO: 145389 - protein, 8 aa, Homo Sapiens
NIDLPASL

SEQ ID NO: 145390 - protein, 8 aa, Homo Sapiens
NTDEMVEL

SEQ ID NO: 145391 - protein, 8 aa, Homo Sapiens
NTDSVVIF

SEQ ID NO: 145392 - protein, 8 aa, Homo Sapiens
NVDICQLL

SEQ ID NO: 145393 - protein, 8 aa, Homo Sapiens
QADCAVLI

SEQ ID NO: 145394 - protein, 8 aa, Homo Sapiens
QADVAVLV

SEQ ID NO: 145395 - protein, 8 aa, Homo Sapiens
QIDGIVHF

SEQ ID NO: 145396 - protein, 8 aa, Homo Sapiens
SADAPMFV

SEQ ID NO: 145397 - protein, 8 aa, Homo Sapiens
SADFHVDL

SEQ ID NO: 145398 - protein, 8 aa, Homo Sapiens
SADLANLL

SEQ ID NO: 145399 - protein, 8 aa, Homo Sapiens
SADTVVIF

SEQ ID NO: 145400 - protein, 8 aa, Homo Sapiens
SFDFHFGF

SEQ ID NO: 145401 - protein, 8 aa, Homo Sapiens
SIDDVVRL

SEQ ID NO: 145402 - protein, 8 aa, Homo Sapiens
SIDEEVYF

SEQ ID NO: 145403 - protein, 8 aa, Homo Sapiens
SIDLPVVV

SEQ ID NO: 145404 - protein, 8 aa, Homo Sapiens
SLDEVVLL

SEQ ID NO: 145405 - protein, 8 aa, Homo Sapiens
STDRVVLI

SEQ ID NO: 145406 - protein, 8 aa, Homo Sapiens
STDTFTHL

SEQ ID NO: 145407 - protein, 8 aa, Homo Sapiens
TADEIVKL

SEQ ID NO: 145408 - protein, 8 aa, Homo Sapiens
TADICQML

SEQ ID NO: 145409 - protein, 8 aa, Homo Sapiens
TADWRVFL

SEQ ID NO: 145410 - protein, 8 aa, Homo Sapiens
TIDFPEFL

SEQ ID NO: 145411 - protein, 8 aa, Homo Sapiens
TIDGIYYV

SEQ ID NO: 145412 - protein, 8 aa, Homo Sapiens
TIDGVVFV

SEQ ID NO: 145413 - protein, 8 aa, Homo Sapiens
TLQGELIL

SEQ ID NO: 145414 - protein, 8 aa, Homo Sapiens
TSDQPILL

SEQ ID NO: 145415 - protein, 8 aa, Homo Sapiens
TTDIFQTV

SEQ ID NO: 145416 - protein, 8 aa, Homo Sapiens
TVDRVVLL

SEQ ID NO: 145417 - protein, 8 aa, Homo Sapiens
TVPSSIVL

SEQ ID NO: 145418 - protein, 8 aa, Homo Sapiens
VAATMLLL

SEQ ID NO: 145419 - protein, 8 aa, Homo Sapiens
VADAGAFL

SEQ ID NO: 145420 - protein, 8 aa, Homo Sapiens
VADHLQFL

SEQ ID NO: 145421 - protein, 8 aa, Homo Sapiens
VADILTQL

SEQ ID NO: 145422 - protein, 8 aa, Homo Sapiens
VADKFTEL

SEQ ID NO: 145423 - protein, 8 aa, Homo Sapiens
VADKHELL

SEQ ID NO: 145424 - protein, 8 aa, Homo Sapiens
VADKIQLI

SEQ ID NO: 145425 - protein, 8 aa, Homo Sapiens
VADLAHVL

SEQ ID NO: 145426 - protein, 8 aa, Homo Sapiens
VADLQTRL

SEQ ID NO: 145427 - protein, 8 aa, Homo Sapiens
VADLVVIL

SEQ ID NO: 145428 - protein, 8 aa, Homo Sapiens
VADLVVNI

SEQ ID NO: 145429 - protein, 8 aa, Homo Sapiens
VADPVVTF

SEQ ID NO: 145430 - protein, 8 aa, Homo Sapiens
VADRFSEL

SEQ ID NO: 145431 - protein, 8 aa, Homo Sapiens
VADSKTLL

SEQ ID NO: 145432 - protein, 8 aa, Homo Sapiens
VADTILFL

SEQ ID NO: 145433 - protein, 8 aa, Homo Sapiens
VADVEALL

SEQ ID NO: 145434 - protein, 8 aa, Homo Sapiens
VADVVAFL

SEQ ID NO: 145435 - protein, 8 aa, Homo Sapiens
VADVVIKF

SEQ ID NO: 145436 - protein, 8 aa, Homo Sapiens
VFDPHGTL

SEQ ID NO: 145437 - protein, 8 aa, Homo Sapiens
VFDPIGHF

SEQ ID NO: 145438 - protein, 8 aa, Homo Sapiens
VFDPVTKL

SEQ ID NO: 145439 - protein, 8 aa, Homo Sapiens
VFDSHPVL

SEQ ID NO: 145440 - protein, 8 aa, Homo Sapiens
VFDVGGLL

SEQ ID NO: 145441 - protein, 8 aa, Homo Sapiens
VGDLAELL

SEQ ID NO: 145442 - protein, 8 aa, Homo Sapiens
VGDLPNGR

SEQ ID NO: 145443 - protein, 8 aa, Homo Sapiens
VGDSVIIF

SEQ ID NO: 145444 - protein, 8 aa, Homo Sapiens
VGGSVEDL

SEQ ID NO: 145445 - protein, 8 aa, Homo Sapiens
VIDAAVLL

SEQ ID NO: 145446 - protein, 8 aa, Homo Sapiens
VIDACIKL

SEQ ID NO: 145447 - protein, 8 aa, Homo Sapiens
VIDACVKL

SEQ ID NO: 145448 - protein, 8 aa, Homo Sapiens
VIDDFVQF

SEQ ID NO: 145449 - protein, 8 aa, Homo Sapiens
VIDECVEM

SEQ ID NO: 145450 - protein, 8 aa, Homo Sapiens
VIDEIISL

SEQ ID NO: 145451 - protein, 8 aa, Homo Sapiens
VIDEPVRL

SEQ ID NO: 145452 - protein, 8 aa, Homo Sapiens
VIDGVTVL

SEQ ID NO: 145453 - protein, 8 aa, Homo Sapiens
VIDICMKL

SEQ ID NO: 145454 - protein, 8 aa, Homo Sapiens
VIDSPGIL

SEQ ID NO: 145455 - protein, 8 aa, Homo Sapiens
VIDTPGIL

SEQ ID NO: 145456 - protein, 8 aa, Homo Sapiens
VIDVGRLL

SEQ ID NO: 145457 - protein, 8 aa, Homo Sapiens
VIDYAVKI

SEQ ID NO: 145458 - protein, 8 aa, Homo Sapiens
VLDELVRP

SEQ ID NO: 145459 - protein, 8 aa, Homo Sapiens
VLDMHGFL

SEQ ID NO: 145460 - protein, 8 aa, Homo Sapiens
VLWVAVLL

SEQ ID NO: 145461 - protein, 8 aa, Homo Sapiens
VNDGVVRL

SEQ ID NO: 145462 - protein, 8 aa, Homo Sapiens
VSDFHVFV

SEQ ID NO: 145463 - protein, 8 aa, Homo Sapiens
VSDLESYL

SEQ ID NO: 145464 - protein, 8 aa, Homo Sapiens
VSDYEMKL

SEQ ID NO: 145465 - protein, 8 aa, Homo Sapiens
VSELAGLL

SEQ ID NO: 145466 - protein, 8 aa, Homo Sapiens
VTDAFARL

SEQ ID NO: 145467 - protein, 8 aa, Homo Sapiens
VTDAIVLL

SEQ ID NO: 145468 - protein, 8 aa, Homo Sapiens
VTDDLVCL

SEQ ID NO: 145469 - protein, 8 aa, Homo Sapiens
VTDEPVYI

SEQ ID NO: 145470 - protein, 8 aa, Homo Sapiens
VTDFFQKL

SEQ ID NO: 145471 - protein, 8 aa, Homo Sapiens
VTDFISHL

SEQ ID NO: 145472 - protein, 8 aa, Homo Sapiens
VTDISHLV

SEQ ID NO: 145473 - protein, 8 aa, Homo Sapiens
VVDAVMML

SEQ ID NO: 145474 - protein, 8 aa, Homo Sapiens
VVDEAVLV

SEQ ID NO: 145475 - protein, 8 aa, Homo Sapiens
VVDEEVFF

SEQ ID NO: 145476 - protein, 8 aa, Homo Sapiens
VVDEFWLL

SEQ ID NO: 145477 - protein, 8 aa, Homo Sapiens
VVDELVRF

SEQ ID NO: 145478 - protein, 8 aa, Homo Sapiens
VVDGIYRL

SEQ ID NO: 145479 - protein, 8 aa, Homo Sapiens
VVDGVSYL

SEQ ID NO: 145480 - protein, 8 aa, Homo Sapiens
VVDIESRL

SEQ ID NO: 145481 - protein, 8 aa, Homo Sapiens
VVDNPIYL

SEQ ID NO: 145482 - protein, 8 aa, Homo Sapiens
VVDQPLKL

SEQ ID NO: 145483 - protein, 8 aa, Homo Sapiens
VVDRALYL

SEQ ID NO: 145484 - protein, 8 aa, Homo Sapiens
VVDRFVEF

SEQ ID NO: 145485 - protein, 8 aa, Homo Sapiens
VVDVFAQL

SEQ ID NO: 145486 - protein, 8 aa, Homo Sapiens
VVDYLTKL

SEQ ID NO: 145487 - protein, 8 aa, Homo Sapiens
WVGDLPNG

SEQ ID NO: 145488 - protein, 8 aa, Homo Sapiens
YADGESFL

SEQ ID NO: 145489 - protein, 8 aa, Homo Sapiens
YADIQSWL

SEQ ID NO: 145490 - protein, 8 aa, Homo Sapiens
YADIVQLL

SEQ ID NO: 145491 - protein, 8 aa, Homo Sapiens
YADTELLL

SEQ ID NO: 145492 - protein, 8 aa, Homo Sapiens
YADVQAVL

SEQ ID NO: 145493 - protein, 8 aa, Homo Sapiens
YFDEHYEY

SEQ ID NO: 145494 - protein, 8 aa, Homo Sapiens
YFDEPVEL

SEQ ID NO: 145495 - protein, 8 aa, Homo Sapiens
YFDVVEEI

SEQ ID NO: 145496 - protein, 8 aa, Homo Sapiens
YIDKTIRV

SEQ ID NO: 145497 - protein, 8 aa, Homo Sapiens
YIDVAVKL

SEQ ID NO: 145498 - protein, 8 aa, Homo Sapiens
YIELPAYL

SEQ ID NO: 145499 - protein, 8 aa, Homo Sapiens
YSDAIVWL

SEQ ID NO: 145500 - protein, 8 aa, Homo Sapiens
YSDLAEFL

SEQ ID NO: 145501 - protein, 8 aa, Homo Sapiens
YSDVSGLL

SEQ ID NO: 145502 - protein, 8 aa, Homo Sapiens
YTDEAVVI

SEQ ID NO: 145503 - protein, 8 aa, Homo Sapiens
YTDELVEL

SEQ ID NO: 145504 - protein, 8 aa, Homo Sapiens
YTDFHIDF

SEQ ID NO: 145505 - protein, 8 aa, Homo Sapiens
YTDFHVDF

SEQ ID NO: 145506 - protein, 8 aa, Homo Sapiens
YTDLEVRV

SEQ ID NO: 145507 - protein, 8 aa, Homo Sapiens
YTDLLRLL

SEQ ID NO: 145508 - protein, 8 aa, Homo Sapiens
YTDNLVRV

SEQ ID NO: 145509 - protein, 8 aa, Homo Sapiens
YTDRVFFL

SEQ ID NO: 145510 - protein, 8 aa, Homo Sapiens
YVDDTQFL

SEQ ID NO: 145511 - protein, 8 aa, Homo Sapiens
YVDDTQFV

SEQ ID NO: 145512 - protein, 8 aa, Homo Sapiens
YVDFPQHL

SEQ ID NO: 145513 - protein, 8 aa, Homo Sapiens
YVDGRVLV

SEQ ID NO: 145514 - protein, 9 aa, Homo Sapiens
AADEPVTVL

SEQ ID NO: 145515 - protein, 9 aa, Homo Sapiens
AADFEIGHF

SEQ ID NO: 145516 - protein, 9 aa, Homo Sapiens
AADHWAWLL

SEQ ID NO: 145517 - protein, 9 aa, Homo Sapiens
AADLLVVHL

SEQ ID NO: 145518 - protein, 9 aa, Homo Sapiens
AADLPARGF

SEQ ID NO: 145519 - protein, 9 aa, Homo Sapiens
AADLSEIEI

SEQ ID NO: 145520 - protein, 9 aa, Homo Sapiens
AADPLASKL

SEQ ID NO: 145521 - protein, 9 aa, Homo Sapiens
AADPRVACL

SEQ ID NO: 145522 - protein, 9 aa, Homo Sapiens
AADPSVVNL

SEQ ID NO: 145523 - protein, 9 aa, Homo Sapiens
AADPVSPLL

SEQ ID NO: 145524 - protein, 9 aa, Homo Sapiens
AADSAVRLW

SEQ ID NO: 145525 - protein, 9 aa, Homo Sapiens
AADTLVTKF

SEQ ID NO: 145526 - protein, 9 aa, Homo Sapiens
AADTVVIFD

SEQ ID NO: 145527 - protein, 9 aa, Homo Sapiens
AAEFVPSFL

SEQ ID NO: 145528 - protein, 9 aa, Homo Sapiens
AAEYPAVKF

SEQ ID NO: 145529 - protein, 9 aa, Homo Sapiens
AAPDDLALL

SEQ ID NO: 145530 - protein, 9 aa, Homo Sapiens
AFADSSYLL

SEQ ID NO: 145531 - protein, 9 aa, Homo Sapiens
AFDCMKNYL

SEQ ID NO: 145532 - protein, 9 aa, Homo Sapiens
AFDDAIAEL

SEQ ID NO: 145533 - protein, 9 aa, Homo Sapiens
AFDEAIAEL

SEQ ID NO: 145534 - protein, 9 aa, Homo Sapiens
AFDLIEHYF

SEQ ID NO: 145535 - protein, 9 aa, Homo Sapiens
AFDLSQVLF

SEQ ID NO: 145536 - protein, 9 aa, Homo Sapiens
AFDLTEQRY

SEQ ID NO: 145537 - protein, 9 aa, Homo Sapiens
AFDLTKTNM

SEQ ID NO: 145538 - protein, 9 aa, Homo Sapiens
AFDNVLNYI

SEQ ID NO: 145539 - protein, 9 aa, Homo Sapiens
AFDPAAAAF

SEQ ID NO: 145540 - protein, 9 aa, Homo Sapiens
AFDPTSTLL

SEQ ID NO: 145541 - protein, 9 aa, Homo Sapiens
AFDPVLNRW

SEQ ID NO: 145542 - protein, 9 aa, Homo Sapiens
AFDVHLNAF

SEQ ID NO: 145543 - protein, 9 aa, Homo Sapiens
AFDVVERSF

SEQ ID NO: 145544 - protein, 9 aa, Homo Sapiens
AIDSPVSFL

SEQ ID NO: 145545 - protein, 9 aa, Homo Sapiens
AIPAFISLL

SEQ ID NO: 145546 - protein, 9 aa, Homo Sapiens
ASDIPGLHL

SEQ ID NO: 145547 - protein, 9 aa, Homo Sapiens
ASDPYQVHV

SEQ ID NO: 145548 - protein, 9 aa, Homo Sapiens
ATDEFASYF

SEQ ID NO: 145549 - protein, 9 aa, Homo Sapiens
ATDLRPIYI

SEQ ID NO: 145550 - protein, 9 aa, Homo Sapiens
ATDPFASVF

SEQ ID NO: 145551 - protein, 9 aa, Homo Sapiens
ATDPGRLLL

SEQ ID NO: 145552 - protein, 9 aa, Homo Sapiens
ATDPNILSL

SEQ ID NO: 145553 - protein, 9 aa, Homo Sapiens
ATDVRRVWL

SEQ ID NO: 145554 - protein, 9 aa, Homo Sapiens
ATDVWAVYF

SEQ ID NO: 145555 - protein, 9 aa, Homo Sapiens
AVDAVIAEL

SEQ ID NO: 145556 - protein, 9 aa, Homo Sapiens
AVDFESNNI

SEQ ID NO: 145557 - protein, 9 aa, Homo Sapiens
AVEEYVYEF

SEQ ID NO: 145558 - protein, 9 aa, Homo Sapiens
AVPEVAVYL

SEQ ID NO: 145559 - protein, 9 aa, Homo Sapiens
AYDASLAML

SEQ ID NO: 145560 - protein, 9 aa, Homo Sapiens
CADPRVPWV

SEQ ID NO: 145561 - protein, 9 aa, Homo Sapiens
CSDFVVVQF

SEQ ID NO: 145562 - protein, 9 aa, Homo Sapiens
CSDGKVLLF

SEQ ID NO: 145563 - protein, 9 aa, Homo Sapiens
DFDVAVVTF

SEQ ID NO: 145564 - protein, 9 aa, Homo Sapiens
DLPNGRVCP

SEQ ID NO: 145565 - protein, 9 aa, Homo Sapiens
ETDPGMVHL

SEQ ID NO: 145566 - protein, 9 aa, Homo Sapiens
FADAASLLL

SEQ ID NO: 145567 - protein, 9 aa, Homo Sapiens
FADAGLVCI

SEQ ID NO: 145568 - protein, 9 aa, Homo Sapiens
FADAVQELL

SEQ ID NO: 145569 - protein, 9 aa, Homo Sapiens
FADELSHLL

SEQ ID NO: 145570 - protein, 9 aa, Homo Sapiens
FADFEKIFV

SEQ ID NO: 145571 - protein, 9 aa, Homo Sapiens
FADFLQAHL

SEQ ID NO: 145572 - protein, 9 aa, Homo Sapiens
FADFLVYEF

SEQ ID NO: 145573 - protein, 9 aa, Homo Sapiens
FADGHVLEL

SEQ ID NO: 145574 - protein, 9 aa, Homo Sapiens
FADGKVYAL

SEQ ID NO: 145575 - protein, 9 aa, Homo Sapiens
FADGVILLL

SEQ ID NO: 145576 - protein, 9 aa, Homo Sapiens
FADHVSSSL

SEQ ID NO: 145577 - protein, 9 aa, Homo Sapiens
FADIALAPM

SEQ ID NO: 145578 - protein, 9 aa, Homo Sapiens
FADLNLAEF

SEQ ID NO: 145579 - protein, 9 aa, Homo Sapiens
FADNDVSRF

SEQ ID NO: 145580 - protein, 9 aa, Homo Sapiens
FADQAEILL

SEQ ID NO: 145581 - protein, 9 aa, Homo Sapiens
FADREVQLL

SEQ ID NO: 145582 - protein, 9 aa, Homo Sapiens
FADVAPLQL

SEQ ID NO: 145583 - protein, 9 aa, Homo Sapiens
FADYPCHTV

SEQ ID NO: 145584 - protein, 9 aa, Homo Sapiens
FADYRPTEV

SEQ ID NO: 145585 - protein, 9 aa, Homo Sapiens
FAIPLIEKL

SEQ ID NO: 145586 - protein, 9 aa, Homo Sapiens
FALPYVDHF

SEQ ID NO: 145587 - protein, 9 aa, Homo Sapiens
FAPEDPCFF

SEQ ID NO: 145588 - protein, 9 aa, Homo Sapiens
FEDEKPALL

SEQ ID NO: 145589 - protein, 9 aa, Homo Sapiens
FFDAIFTQL

SEQ ID NO: 145590 - protein, 9 aa, Homo Sapiens
FFDAQEVLL

SEQ ID NO: 145591 - protein, 9 aa, Homo Sapiens
FFDDCIEKL

SEQ ID NO: 145592 - protein, 9 aa, Homo Sapiens
FFDEKLNSL

SEQ ID NO: 145593 - protein, 9 aa, Homo Sapiens
FFDEVVKQM

SEQ ID NO: 145594 - protein, 9 aa, Homo Sapiens
FFDNISSEL

SEQ ID NO: 145595 - protein, 9 aa, Homo Sapiens
FFDPHQSTF

SEQ ID NO: 145596 - protein, 9 aa, Homo Sapiens
FFDPSLLHL

SEQ ID NO: 145597 - protein, 9 aa, Homo Sapiens
FFDSVQVVF

SEQ ID NO: 145598 - protein, 9 aa, Homo Sapiens
FFDTNTSVL

SEQ ID NO: 145599 - protein, 9 aa, Homo Sapiens
FFDVTYRHF

SEQ ID NO: 145600 - protein, 9 aa, Homo Sapiens
FFGTHETAF

SEQ ID NO: 145601 - protein, 9 aa, Homo Sapiens
FIDEAGHCM

SEQ ID NO: 145602 - protein, 9 aa, Homo Sapiens
FIDGGGSVL

SEQ ID NO: 145603 - protein, 9 aa, Homo Sapiens
FIDKPVCFV

SEQ ID NO: 145604 - protein, 9 aa, Homo Sapiens
FIEEGIVVM

SEQ ID NO: 145605 - protein, 9 aa, Homo Sapiens
FIEEHATKL

SEQ ID NO: 145606 - protein, 9 aa, Homo Sapiens
FIEEKTLLL

SEQ ID NO: 145607 - protein, 9 aa, Homo Sapiens
FIISRTQAL

SEQ ID NO: 145608 - protein, 9 aa, Homo Sapiens
FIPDQPFRV

SEQ ID NO: 145609 - protein, 9 aa, Homo Sapiens
FIPGRPMLL

SEQ ID NO: 145610 - protein, 9 aa, Homo Sapiens
FIPPYVPRF

SEQ ID NO: 145611 - protein, 9 aa, Homo Sapiens
FIPSPPSFL

SEQ ID NO: 145612 - protein, 9 aa, Homo Sapiens
FLDALIVSM

SEQ ID NO: 145613 - protein, 9 aa, Homo Sapiens
FLDEPTNHL

SEQ ID NO: 145614 - protein, 9 aa, Homo Sapiens
FLDLTEQEF

SEQ ID NO: 145615 - protein, 9 aa, Homo Sapiens
FLERLPMML

SEQ ID NO: 145616 - protein, 9 aa, Homo Sapiens
FLPEAPAEL

SEQ ID NO: 145617 - protein, 9 aa, Homo Sapiens
FLPPFPAHL

SEQ ID NO: 145618 - protein, 9 aa, Homo Sapiens
FLPQKIIYL

SEQ ID NO: 145619 - protein, 9 aa, Homo Sapiens
FQDPSVTQL

SEQ ID NO: 145620 - protein, 9 aa, Homo Sapiens
FSDCHVAWV

SEQ ID NO: 145621 - protein, 9 aa, Homo Sapiens
FSDEWVACL

SEQ ID NO: 145622 - protein, 9 aa, Homo Sapiens
FSDFLLTKL

SEQ ID NO: 145623 - protein, 9 aa, Homo Sapiens
FSDTGNFGF

SEQ ID NO: 145624 - protein, 9 aa, Homo Sapiens
FSEEHPVLL

SEQ ID NO: 145625 - protein, 9 aa, Homo Sapiens
FSEETPVVL

SEQ ID NO: 145626 - protein, 9 aa, Homo Sapiens
FSPFHASVL

SEQ ID NO: 145627 - protein, 9 aa, Homo Sapiens
FTADPLSLL

SEQ ID NO: 145628 - protein, 9 aa, Homo Sapiens
FTDAVVSWL

SEQ ID NO: 145629 - protein, 9 aa, Homo Sapiens
FTDEESRVF

SEQ ID NO: 145630 - protein, 9 aa, Homo Sapiens
FTDERIFML

SEQ ID NO: 145631 - protein, 9 aa, Homo Sapiens
FTDFKVVNV

SEQ ID NO: 145632 - protein, 9 aa, Homo Sapiens
FTDFLIPML

SEQ ID NO: 145633 - protein, 9 aa, Homo Sapiens
FTDGITNKL

SEQ ID NO: 145634 - protein, 9 aa, Homo Sapiens
FTDIGKVDF

SEQ ID NO: 145635 - protein, 9 aa, Homo Sapiens
FTDKRIGYL

SEQ ID NO: 145636 - protein, 9 aa, Homo Sapiens
FTDKRVGYL

SEQ ID NO: 145637 - protein, 9 aa, Homo Sapiens
FTDMFIYWI

SEQ ID NO: 145638 - protein, 9 aa, Homo Sapiens
FTDNVPALV

SEQ ID NO: 145639 - protein, 9 aa, Homo Sapiens
FTDSLISNL

SEQ ID NO: 145640 - protein, 9 aa, Homo Sapiens
FTDTSIILF

SEQ ID NO: 145641 - protein, 9 aa, Homo Sapiens
FTDTVGNIL

SEQ ID NO: 145642 - protein, 9 aa, Homo Sapiens
FTDVIGHYI

SEQ ID NO: 145643 - protein, 9 aa, Homo Sapiens
FTDVNKIYL

SEQ ID NO: 145644 - protein, 9 aa, Homo Sapiens
FTDVVTTNL

SEQ ID NO: 145645 - protein, 9 aa, Homo Sapiens
FTDYDVIHL

SEQ ID NO: 145646 - protein, 9 aa, Homo Sapiens
FTEDHYVEF

SEQ ID NO: 145647 - protein, 9 aa, Homo Sapiens
FTEEIPLKI

SEQ ID NO: 145648 - protein, 9 aa, Homo Sapiens
FTEFYTTLL

SEQ ID NO: 145649 - protein, 9 aa, Homo Sapiens
FTETSIILF

SEQ ID NO: 145650 - protein, 9 aa, Homo Sapiens
FTPDIPTML

SEQ ID NO: 145651 - protein, 9 aa, Homo Sapiens
FVDDYTVRV

SEQ ID NO: 145652 - protein, 9 aa, Homo Sapiens
FVDEFLTYL

SEQ ID NO: 145653 - protein, 9 aa, Homo Sapiens
FVDIVKVLL

SEQ ID NO: 145654 - protein, 9 aa, Homo Sapiens
FVDLEPTVI

SEQ ID NO: 145655 - protein, 9 aa, Homo Sapiens
FVDLSGHNL

SEQ ID NO: 145656 - protein, 9 aa, Homo Sapiens
FVDPAQITM

SEQ ID NO: 145657 - protein, 9 aa, Homo Sapiens
FVDTNLYFL

SEQ ID NO: 145658 - protein, 9 aa, Homo Sapiens
FVDWCPTGF

SEQ ID NO: 145659 - protein, 9 aa, Homo Sapiens
FVEEEEHFL

SEQ ID NO: 145660 - protein, 9 aa, Homo Sapiens
FVEETVYLL

SEQ ID NO: 145661 - protein, 9 aa, Homo Sapiens
FVEGLIVTL

SEQ ID NO: 145662 - protein, 9 aa, Homo Sapiens
FVEGRSVEF

SEQ ID NO: 145663 - protein, 9 aa, Homo Sapiens
FVEPFVILL

SEQ ID NO: 145664 - protein, 9 aa, Homo Sapiens
FWDGKIVLV

SEQ ID NO: 145665 - protein, 9 aa, Homo Sapiens
FWPPYVELL

SEQ ID NO: 145666 - protein, 9 aa, Homo Sapiens
FYDERIVVV

SEQ ID NO: 145667 - protein, 9 aa, Homo Sapiens
GADNSVVRF

SEQ ID NO: 145668 - protein, 9 aa, Homo Sapiens
GDLPNGRVC

SEQ ID NO: 145669 - protein, 9 aa, Homo Sapiens
GLVEGAKNI

SEQ ID NO: 145670 - protein, 9 aa, Homo Sapiens
GSDEPPVFL

SEQ ID NO: 145671 - protein, 9 aa, Homo Sapiens
GSDPRVTQL

SEQ ID NO: 145672 - protein, 9 aa, Homo Sapiens
HADILLINL

SEQ ID NO: 145673 - protein, 9 aa, Homo Sapiens
HADVGVALL

SEQ ID NO: 145674 - protein, 9 aa, Homo Sapiens
HFDDFVTNL

SEQ ID NO: 145675 - protein, 9 aa, Homo Sapiens
HFDDTVVCL

SEQ ID NO: 145676 - protein, 9 aa, Homo Sapiens
HFDFQGCNF

SEQ ID NO: 145677 - protein, 9 aa, Homo Sapiens
HFDGFVVEV

SEQ ID NO: 145678 - protein, 9 aa, Homo Sapiens
HFDIVIRNL

SEQ ID NO: 145679 - protein, 9 aa, Homo Sapiens
HFDLNLRQF

SEQ ID NO: 145680 - protein, 9 aa, Homo Sapiens
HFDLSVIEL

SEQ ID NO: 145681 - protein, 9 aa, Homo Sapiens
HFDPEVVQI

SEQ ID NO: 145682 - protein, 9 aa, Homo Sapiens
HFDYQSLLM

SEQ ID NO: 145683 - protein, 9 aa, Homo Sapiens
HIIAGAGEL

SEQ ID NO: 145684 - protein, 9 aa, Homo Sapiens
HIPDVITYL

SEQ ID NO: 145685 - protein, 9 aa, Homo Sapiens
HLDPGPIYM

SEQ ID NO: 145686 - protein, 9 aa, Homo Sapiens
HTDLPVSVF

SEQ ID NO: 145687 - protein, 9 aa, Homo Sapiens
HVPEHAVVL

SEQ ID NO: 145688 - protein, 9 aa, Homo Sapiens
HYDEQQNFF

SEQ ID NO: 145689 - protein, 9 aa, Homo Sapiens
HYDPATEEF

SEQ ID NO: 145690 - protein, 9 aa, Homo Sapiens
HYDVQSILF

SEQ ID NO: 145691 - protein, 9 aa, Homo Sapiens
IADGGFTEL

SEQ ID NO: 145692 - protein, 9 aa, Homo Sapiens
IADGLPVAV

SEQ ID NO: 145693 - protein, 9 aa, Homo Sapiens
IADIHPIQV

SEQ ID NO: 145694 - protein, 9 aa, Homo Sapiens
IADIIRTCL

SEQ ID NO: 145695 - protein, 9 aa, Homo Sapiens
IADIVTSVF

SEQ ID NO: 145696 - protein, 9 aa, Homo Sapiens
IADLAHLLL

SEQ ID NO: 145697 - protein, 9 aa, Homo Sapiens
IADLGLIRV

SEQ ID NO: 145698 - protein, 9 aa, Homo Sapiens
IADLISSFL

SEQ ID NO: 145699 - protein, 9 aa, Homo Sapiens
IADLMEEKF

SEQ ID NO: 145700 - protein, 9 aa, Homo Sapiens
IADLPSTQL

SEQ ID NO: 145701 - protein, 9 aa, Homo Sapiens
IADLVTSVL

SEQ ID NO: 145702 - protein, 9 aa, Homo Sapiens
IADLVVAVF

SEQ ID NO: 145703 - protein, 9 aa, Homo Sapiens
IADPIVLAL

SEQ ID NO: 145704 - protein, 9 aa, Homo Sapiens
IADPNIAKL

SEQ ID NO: 145705 - protein, 9 aa, Homo Sapiens
IADRLNVEF

SEQ ID NO: 145706 - protein, 9 aa, Homo Sapiens
IADSNPMVV

SEQ ID NO: 145707 - protein, 9 aa, Homo Sapiens
IADTVPKYL

SEQ ID NO: 145708 - protein, 9 aa, Homo Sapiens
IFDEFRTVL

SEQ ID NO: 145709 - protein, 9 aa, Homo Sapiens
IFDGNVAHI

SEQ ID NO: 145710 - protein, 9 aa, Homo Sapiens
IFDLGGGTF

SEQ ID NO: 145711 - protein, 9 aa, Homo Sapiens
IFDLSCMGF

SEQ ID NO: 145712 - protein, 9 aa, Homo Sapiens
IFDNTFSRF

SEQ ID NO: 145713 - protein, 9 aa, Homo Sapiens
IFDPTRECM

SEQ ID NO: 145714 - protein, 9 aa, Homo Sapiens
IFDPVKQQF

SEQ ID NO: 145715 - protein, 9 aa, Homo Sapiens
IFDQSGTYL

SEQ ID NO: 145716 - protein, 9 aa, Homo Sapiens
IFDRVLTEL

SEQ ID NO: 145717 - protein, 9 aa, Homo Sapiens
IFDSKVTEI

SEQ ID NO: 145718 - protein, 9 aa, Homo Sapiens
IFDVHVHEV

SEQ ID NO: 145719 - protein, 9 aa, Homo Sapiens
IFDVLPNFF

SEQ ID NO: 145720 - protein, 9 aa, Homo Sapiens
IIDDALVRL

SEQ ID NO: 145721 - protein, 9 aa, Homo Sapiens
IIDDLPCRF

SEQ ID NO: 145722 - protein, 9 aa, Homo Sapiens
IIDEFIYQF

SEQ ID NO: 145723 - protein, 9 aa, Homo Sapiens
IIDEQPLIF

SEQ ID NO: 145724 - protein, 9 aa, Homo Sapiens
IIDEVVNKF

SEQ ID NO: 145725 - protein, 9 aa, Homo Sapiens
IIDKEVSLM

SEQ ID NO: 145726 - protein, 9 aa, Homo Sapiens
IIEEEFVSL

SEQ ID NO: 145727 - protein, 9 aa, Homo Sapiens
IIEEHPPMI

SEQ ID NO: 145728 - protein, 9 aa, Homo Sapiens
IIPPEPSYL

SEQ ID NO: 145729 - protein, 9 aa, Homo Sapiens
ILDPHVVLL

SEQ ID NO: 145730 - protein, 9 aa, Homo Sapiens
ILPTAPMLV

SEQ ID NO: 145731 - protein, 9 aa, Homo Sapiens
IQPDNIVYV

SEQ ID NO: 145732 - protein, 9 aa, Homo Sapiens
ISDEGIAYL

SEQ ID NO: 145733 - protein, 9 aa, Homo Sapiens
ISDHYPVEV

SEQ ID NO: 145734 - protein, 9 aa, Homo Sapiens
ISDLDTIWL

SEQ ID NO: 145735 - protein, 9 aa, Homo Sapiens
ISPEFFTVL

SEQ ID NO: 145736 - protein, 9 aa, Homo Sapiens
ITDEGLITI

SEQ ID NO: 145737 - protein, 9 aa, Homo Sapiens
ITDGVITDL

SEQ ID NO: 145738 - protein, 9 aa, Homo Sapiens
ITDHLIAML

SEQ ID NO: 145739 - protein, 9 aa, Homo Sapiens
ITDILVTEF

SEQ ID NO: 145740 - protein, 9 aa, Homo Sapiens
ITDKEVIYI

SEQ ID NO: 145741 - protein, 9 aa, Homo Sapiens
ITDKGIIAL

SEQ ID NO: 145742 - protein, 9 aa, Homo Sapiens
ITDLPSEVL

SEQ ID NO: 145743 - protein, 9 aa, Homo Sapiens
ITDPDVVHI

SEQ ID NO: 145744 - protein, 9 aa, Homo Sapiens
ITDPEVVFV

SEQ ID NO: 145745 - protein, 9 aa, Homo Sapiens
ITDPQQLQL

SEQ ID NO: 145746 - protein, 9 aa, Homo Sapiens
ITDPRTVFV

SEQ ID NO: 145747 - protein, 9 aa, Homo Sapiens
ITDPSVIVM

SEQ ID NO: 145748 - protein, 9 aa, Homo Sapiens
ITDQYIYMV

SEQ ID NO: 145749 - protein, 9 aa, Homo Sapiens
ITDVQLAIF

SEQ ID NO: 145750 - protein, 9 aa, Homo Sapiens
ITENFPLKL

SEQ ID NO: 145751 - protein, 9 aa, Homo Sapiens
IVDDFGTHL

SEQ ID NO: 145752 - protein, 9 aa, Homo Sapiens
IVDDHTPWV

SEQ ID NO: 145753 - protein, 9 aa, Homo Sapiens
IVDEAIYYF

SEQ ID NO: 145754 - protein, 9 aa, Homo Sapiens
IVDEVNGLI

SEQ ID NO: 145755 - protein, 9 aa, Homo Sapiens
IVDGAVVKF

SEQ ID NO: 145756 - protein, 9 aa, Homo Sapiens
IVDGRVYYI

SEQ ID NO: 145757 - protein, 9 aa, Homo Sapiens
IVDIPGTSV

SEQ ID NO: 145758 - protein, 9 aa, Homo Sapiens
IVDRPVTLV

SEQ ID NO: 145759 - protein, 9 aa, Homo Sapiens
IVDTPEVVL

SEQ ID NO: 145760 - protein, 9 aa, Homo Sapiens
IVDVRPTLV

SEQ ID NO: 145761 - protein, 9 aa, Homo Sapiens
IVENLLMIL

SEQ ID NO: 145762 - protein, 9 aa, Homo Sapiens
IVPKKPPLL

SEQ ID NO: 145763 - protein, 9 aa, Homo Sapiens
IVPVSPAEV

SEQ ID NO: 145764 - protein, 9 aa, Homo Sapiens
IWDETPLYF

SEQ ID NO: 145765 - protein, 9 aa, Homo Sapiens
IWDPVLSVM

SEQ ID NO: 145766 - protein, 9 aa, Homo Sapiens
IYDFIGEFM

SEQ ID NO: 145767 - protein, 9 aa, Homo Sapiens
IYDLATQTL

SEQ ID NO: 145768 - protein, 9 aa, Homo Sapiens
IYDLVDRHL

SEQ ID NO: 145769 - protein, 9 aa, Homo Sapiens
IYDSVKVYF

SEQ ID NO: 145770 - protein, 9 aa, Homo Sapiens
KADEKIIFL

SEQ ID NO: 145771 - protein, 9 aa, Homo Sapiens
KADGVPVYL

SEQ ID NO: 145772 - protein, 9 aa, Homo Sapiens
KADSVVVLL

SEQ ID NO: 145773 - protein, 9 aa, Homo Sapiens
KADVVISAF

SEQ ID NO: 145774 - protein, 9 aa, Homo Sapiens
KADVVPVTL

SEQ ID NO: 145775 - protein, 9 aa, Homo Sapiens
KFDDIRIYF

SEQ ID NO: 145776 - protein, 9 aa, Homo Sapiens
KFDFPVSYL

SEQ ID NO: 145777 - protein, 9 aa, Homo Sapiens
KIDDKPVKI

SEQ ID NO: 145778 - protein, 9 aa, Homo Sapiens
KSDPLCVLL

SEQ ID NO: 145779 - protein, 9 aa, Homo Sapiens
KSDPSIVLL

SEQ ID NO: 145780 - protein, 9 aa, Homo Sapiens
KSDPSIVRL

SEQ ID NO: 145781 - protein, 9 aa, Homo Sapiens
KTDAVTVLL

SEQ ID NO: 145782 - protein, 9 aa, Homo Sapiens
KTDDLITRF

SEQ ID NO: 145783 - protein, 9 aa, Homo Sapiens
KTDIIDHSF

SEQ ID NO: 145784 - protein, 9 aa, Homo Sapiens
KTDKTLVLL

SEQ ID NO: 145785 - protein, 9 aa, Homo Sapiens
KTDQFPLFL

SEQ ID NO: 145786 - protein, 9 aa, Homo Sapiens
KTDQLVSFL

SEQ ID NO: 145787 - protein, 9 aa, Homo Sapiens
KTDVTVVRF

SEQ ID NO: 145788 - protein, 9 aa, Homo Sapiens
LADAINTEF

SEQ ID NO: 145789 - protein, 9 aa, Homo Sapiens
LADAVAVTM

SEQ ID NO: 145790 - protein, 9 aa, Homo Sapiens
LADEAEVHL

SEQ ID NO: 145791 - protein, 9 aa, Homo Sapiens
LADERVLWL

SEQ ID NO: 145792 - protein, 9 aa, Homo Sapiens
LADEVITVF

SEQ ID NO: 145793 - protein, 9 aa, Homo Sapiens
LADFEAGLL

SEQ ID NO: 145794 - protein, 9 aa, Homo Sapiens
LADGLKVVL

SEQ ID NO: 145795 - protein, 9 aa, Homo Sapiens
LADGSIAVL

SEQ ID NO: 145796 - protein, 9 aa, Homo Sapiens
LADIIATGF

SEQ ID NO: 145797 - protein, 9 aa, Homo Sapiens
LADIVATGF

SEQ ID NO: 145798 - protein, 9 aa, Homo Sapiens
LADLHPDVF

SEQ ID NO: 145799 - protein, 9 aa, Homo Sapiens
LADLQLEYL

SEQ ID NO: 145800 - protein, 9 aa, Homo Sapiens
LADNDEVKF

SEQ ID NO: 145801 - protein, 9 aa, Homo Sapiens
LADNVPVTV

SEQ ID NO: 145802 - protein, 9 aa, Homo Sapiens
LADPAVTDF

SEQ ID NO: 145803 - protein, 9 aa, Homo Sapiens
LADPGIITI

SEQ ID NO: 145804 - protein, 9 aa, Homo Sapiens
LADPGPVNF

SEQ ID NO: 145805 - protein, 9 aa, Homo Sapiens
LADQGEIRV

SEQ ID NO: 145806 - protein, 9 aa, Homo Sapiens
LADRNVTVL

SEQ ID NO: 145807 - protein, 9 aa, Homo Sapiens
LADSKEIFL

SEQ ID NO: 145808 - protein, 9 aa, Homo Sapiens
LADTQPAVL

SEQ ID NO: 145809 - protein, 9 aa, Homo Sapiens
LALAFFAII

SEQ ID NO: 145810 - protein, 9 aa, Homo Sapiens
LAPNIISQL

SEQ ID NO: 145811 - protein, 9 aa, Homo Sapiens
LDEVAMGEM

SEQ ID NO: 145812 - protein, 9 aa, Homo Sapiens
LDTLVPAKF

SEQ ID NO: 145813 - protein, 9 aa, Homo Sapiens
LFDGSPTYV

SEQ ID NO: 145814 - protein, 9 aa, Homo Sapiens
LFDITGQDF

SEQ ID NO: 145815 - protein, 9 aa, Homo Sapiens
LFDLVCHEF

SEQ ID NO: 145816 - protein, 9 aa, Homo Sapiens
LFDPMTGTF

SEQ ID NO: 145817 - protein, 9 aa, Homo Sapiens
LFDVQILNY

SEQ ID NO: 145818 - protein, 9 aa, Homo Sapiens
LIDEPSAYL

SEQ ID NO: 145819 - protein, 9 aa, Homo Sapiens
LIDLPGTEL

SEQ ID NO: 145820 - protein, 9 aa, Homo Sapiens
LIDQQVVYI

SEQ ID NO: 145821 - protein, 9 aa, Homo Sapiens
LIPDDLSLL

SEQ ID NO: 145822 - protein, 9 aa, Homo Sapiens
LLDGGVINL

SEQ ID NO: 145823 - protein, 9 aa, Homo Sapiens
LLPDIISRL

SEQ ID NO: 145824 - protein, 9 aa, Homo Sapiens
LLPERPSYL

SEQ ID NO: 145825 - protein, 9 aa, Homo Sapiens
LRDEFLVKI

SEQ ID NO: 145826 - protein, 9 aa, Homo Sapiens
LSDEEIVKF

SEQ ID NO: 145827 - protein, 9 aa, Homo Sapiens
LSDGVVVQV

SEQ ID NO: 145828 - protein, 9 aa, Homo Sapiens
LSVMEEVLI

SEQ ID NO: 145829 - protein, 9 aa, Homo Sapiens
LTDDGRVFL

SEQ ID NO: 145830 - protein, 9 aa, Homo Sapiens
LTDEDVVRL

SEQ ID NO: 145831 - protein, 9 aa, Homo Sapiens
LTDEGVVAL

SEQ ID NO: 145832 - protein, 9 aa, Homo Sapiens
LTDHTVTFL

SEQ ID NO: 145833 - protein, 9 aa, Homo Sapiens
LTDPAIVKV

SEQ ID NO: 145834 - protein, 9 aa, Homo Sapiens
LTDPDIHVL

SEQ ID NO: 145835 - protein, 9 aa, Homo Sapiens
LTDPRLLYI

SEQ ID NO: 145836 - protein, 9 aa, Homo Sapiens
LTDQTPVLL

SEQ ID NO: 145837 - protein, 9 aa, Homo Sapiens
LTEALPVKL

SEQ ID NO: 145838 - protein, 9 aa, Homo Sapiens
LTEEGVIKV

SEQ ID NO: 145839 - protein, 9 aa, Homo Sapiens
LTEFGVIHL

SEQ ID NO: 145840 - protein, 9 aa, Homo Sapiens
LTEQRIVFF

SEQ ID NO: 145841 - protein, 9 aa, Homo Sapiens
LVDLEPGTM

SEQ ID NO: 145842 - protein, 9 aa, Homo Sapiens
LVEIVGCHF

SEQ ID NO: 145843 - protein, 9 aa, Homo Sapiens
LYDLVTEKM

SEQ ID NO: 145844 - protein, 9 aa, Homo Sapiens
LYDPCTVMF

SEQ ID NO: 145845 - protein, 9 aa, Homo Sapiens
LYDPVISKL

SEQ ID NO: 145846 - protein, 9 aa, Homo Sapiens
LYDVVDVKY

SEQ ID NO: 145847 - protein, 9 aa, Homo Sapiens
MADAGILRL

SEQ ID NO: 145848 - protein, 9 aa, Homo Sapiens
MADIPGHVF

SEQ ID NO: 145849 - protein, 9 aa, Homo Sapiens
MADTFLEHM

SEQ ID NO: 145850 - protein, 9 aa, Homo Sapiens
MFDIVGTHL

SEQ ID NO: 145851 - protein, 9 aa, Homo Sapiens
MIPTLPSIL

SEQ ID NO: 145852 - protein, 9 aa, Homo Sapiens
MLDPLEVHL

SEQ ID NO: 145853 - protein, 9 aa, Homo Sapiens
MTDDKITEV

SEQ ID NO: 145854 - protein, 9 aa, Homo Sapiens
MTDPEMVEV

SEQ ID NO: 145855 - protein, 9 aa, Homo Sapiens
MTDPIRILV

SEQ ID NO: 145856 - protein, 9 aa, Homo Sapiens
MTDVVAAFL

SEQ ID NO: 145857 - protein, 9 aa, Homo Sapiens
MVDGKPVNL

SEQ ID NO: 145858 - protein, 9 aa, Homo Sapiens
MVDSKPVNL

SEQ ID NO: 145859 - protein, 9 aa, Homo Sapiens
NADAIVVKL

SEQ ID NO: 145860 - protein, 9 aa, Homo Sapiens
NADGKIISL

SEQ ID NO: 145861 - protein, 9 aa, Homo Sapiens
NADIAVVEM

SEQ ID NO: 145862 - protein, 9 aa, Homo Sapiens
NADKLTVKF

SEQ ID NO: 145863 - protein, 9 aa, Homo Sapiens
NADPILISL

SEQ ID NO: 145864 - protein, 9 aa, Homo Sapiens
NADPLEVML

SEQ ID NO: 145865 - protein, 9 aa, Homo Sapiens
NADPLGVLI

SEQ ID NO: 145866 - protein, 9 aa, Homo Sapiens
NADPQAVTM

SEQ ID NO: 145867 - protein, 9 aa, Homo Sapiens
NADVALVNF

SEQ ID NO: 145868 - protein, 9 aa, Homo Sapiens
NAYTGIVLL

SEQ ID NO: 145869 - protein, 9 aa, Homo Sapiens
NFDDIKNGL

SEQ ID NO: 145870 - protein, 9 aa, Homo Sapiens
NFDFTRSYL

SEQ ID NO: 145871 - protein, 9 aa, Homo Sapiens
NFDLTKNYL

SEQ ID NO: 145872 - protein, 9 aa, Homo Sapiens
NFDNILNSF

SEQ ID NO: 145873 - protein, 9 aa, Homo Sapiens
NFDTIDQQF

SEQ ID NO: 145874 - protein, 9 aa, Homo Sapiens
NIDIDPVYL

SEQ ID NO: 145875 - protein, 9 aa, Homo Sapiens
NIDVVGVSF

SEQ ID NO: 145876 - protein, 9 aa, Homo Sapiens
NTDEPPMVF

SEQ ID NO: 145877 - protein, 9 aa, Homo Sapiens
NTDPECYWL

SEQ ID NO: 145878 - protein, 9 aa, Homo Sapiens
NVDAAVVLL

SEQ ID NO: 145879 - protein, 9 aa, Homo Sapiens
NVDSLITRL

SEQ ID NO: 145880 - protein, 9 aa, Homo Sapiens
NYDEALRLL

SEQ ID NO: 145881 - protein, 9 aa, Homo Sapiens
NYDFGPIHM

SEQ ID NO: 145882 - protein, 9 aa, Homo Sapiens
NYDLALKYF

SEQ ID NO: 145883 - protein, 9 aa, Homo Sapiens
PIRLLAAAA

SEQ ID NO: 145884 - protein, 9 aa, Homo Sapiens
PTSAVITTI

SEQ ID NO: 145885 - protein, 9 aa, Homo Sapiens
QADEVIAIL

SEQ ID NO: 145886 - protein, 9 aa, Homo Sapiens
QADGRVVLV

SEQ ID NO: 145887 - protein, 9 aa, Homo Sapiens
QIPEIKQTL

SEQ ID NO: 145888 - protein, 9 aa, Homo Sapiens
QKADIEEIK

SEQ ID NO: 145889 - protein, 9 aa, Homo Sapiens
QLDPLVVEL

SEQ ID NO: 145890 - protein, 9 aa, Homo Sapiens
QLPEQPLFL

SEQ ID NO: 145891 - protein, 9 aa, Homo Sapiens
QTDHTPVHL

SEQ ID NO: 145892 - protein, 9 aa, Homo Sapiens
QTDVGITHF

SEQ ID NO: 145893 - protein, 9 aa, Homo Sapiens
QWDLVENYL

SEQ ID NO: 145894 - protein, 9 aa, Homo Sapiens
RADAPVALV

SEQ ID NO: 145895 - protein, 9 aa, Homo Sapiens
RFDCAIVLL

SEQ ID NO: 145896 - protein, 9 aa, Homo Sapiens
RFDGRVVLV

SEQ ID NO: 145897 - protein, 9 aa, Homo Sapiens
RFDPLGHYL

SEQ ID NO: 145898 - protein, 9 aa, Homo Sapiens
RFDYTNSEF

SEQ ID NO: 145899 - protein, 9 aa, Homo Sapiens
RLPPTPLLL

SEQ ID NO: 145900 - protein, 9 aa, Homo Sapiens
RTDCSPIQF

SEQ ID NO: 145901 - protein, 9 aa, Homo Sapiens
RTDDKVIRF

SEQ ID NO: 145902 - protein, 9 aa, Homo Sapiens
RTDDTPVVL

SEQ ID NO: 145903 - protein, 9 aa, Homo Sapiens
RTDEIGVAF

SEQ ID NO: 145904 - protein, 9 aa, Homo Sapiens
RTDGKVFQF

SEQ ID NO: 145905 - protein, 9 aa, Homo Sapiens
RTDPIPIVV

SEQ ID NO: 145906 - protein, 9 aa, Homo Sapiens
RTDPVPVTI

SEQ ID NO: 145907 - protein, 9 aa, Homo Sapiens
RTDSEIALL

SEQ ID NO: 145908 - protein, 9 aa, Homo Sapiens
RTDVPGELL

SEQ ID NO: 145909 - protein, 9 aa, Homo Sapiens
RYDLGGLVM

SEQ ID NO: 145910 - protein, 9 aa, Homo Sapiens
SADDKTVRL

SEQ ID NO: 145911 - protein, 9 aa, Homo Sapiens
SADELVTRI

SEQ ID NO: 145912 - protein, 9 aa, Homo Sapiens
SADEPMTTF

SEQ ID NO: 145913 - protein, 9 aa, Homo Sapiens
SADEVQRFF

SEQ ID NO: 145914 - protein, 9 aa, Homo Sapiens
SADFETVRM

SEQ ID NO: 145915 - protein, 9 aa, Homo Sapiens
SADFPALVV

SEQ ID NO: 145916 - protein, 9 aa, Homo Sapiens
SADFSPAFL

SEQ ID NO: 145917 - protein, 9 aa, Homo Sapiens
SADHPVIKV

SEQ ID NO: 145918 - protein, 9 aa, Homo Sapiens
SADISLERL

SEQ ID NO: 145919 - protein, 9 aa, Homo Sapiens
SADKFQVLL

SEQ ID NO: 145920 - protein, 9 aa, Homo Sapiens
SADPEVMLL

SEQ ID NO: 145921 - protein, 9 aa, Homo Sapiens
SADPLGAWL

SEQ ID NO: 145922 - protein, 9 aa, Homo Sapiens
SADPNVVDL

SEQ ID NO: 145923 - protein, 9 aa, Homo Sapiens
SADPRHILL

SEQ ID NO: 145924 - protein, 9 aa, Homo Sapiens
SADRFVTLL

SEQ ID NO: 145925 - protein, 9 aa, Homo Sapiens
SADSKVLLF

SEQ ID NO: 145926 - protein, 9 aa, Homo Sapiens
SADSRIVKM

SEQ ID NO: 145927 - protein, 9 aa, Homo Sapiens
SADTVVIFD

SEQ ID NO: 145928 - protein, 9 aa, Homo Sapiens
SADVAAVVM

SEQ ID NO: 145929 - protein, 9 aa, Homo Sapiens
SADVKEVLL

SEQ ID NO: 145930 - protein, 9 aa, Homo Sapiens
SAPKYIDYL

SEQ ID NO: 145931 - protein, 9 aa, Homo Sapiens
SFDAHLTEL

SEQ ID NO: 145932 - protein, 9 aa, Homo Sapiens
SFDCIQQTF

SEQ ID NO: 145933 - protein, 9 aa, Homo Sapiens
SFDEIHQLF

SEQ ID NO: 145934 - protein, 9 aa, Homo Sapiens
SFDETCTRF

SEQ ID NO: 145935 - protein, 9 aa, Homo Sapiens
SFDETVTHF

SEQ ID NO: 145936 - protein, 9 aa, Homo Sapiens
SFDGIIAMM

SEQ ID NO: 145937 - protein, 9 aa, Homo Sapiens
SFDIQLTSV

SEQ ID NO: 145938 - protein, 9 aa, Homo Sapiens
SFDLAKVLL

SEQ ID NO: 145939 - protein, 9 aa, Homo Sapiens
SFDTGFTSF

SEQ ID NO: 145940 - protein, 9 aa, Homo Sapiens
SFDVADRMF

SEQ ID NO: 145941 - protein, 9 aa, Homo Sapiens
SFEEKPVYI

SEQ ID NO: 145942 - protein, 9 aa, Homo Sapiens
SIDDLPTVL

SEQ ID NO: 145943 - protein, 9 aa, Homo Sapiens
SIDRNPPQL

SEQ ID NO: 145944 - protein, 9 aa, Homo Sapiens
SIPDFPMHL

SEQ ID NO: 145945 - protein, 9 aa, Homo Sapiens
SIPERPAQL

SEQ ID NO: 145946 - protein, 9 aa, Homo Sapiens
SIPGGPVRL

SEQ ID NO: 145947 - protein, 9 aa, Homo Sapiens
SLPDIPAHL

SEQ ID NO: 145948 - protein, 9 aa, Homo Sapiens
SMDPLPVFL

SEQ ID NO: 145949 - protein, 9 aa, Homo Sapiens
SSDPKVLTL

SEQ ID NO: 145950 - protein, 9 aa, Homo Sapiens
STDDFFAGL

SEQ ID NO: 145951 - protein, 9 aa, Homo Sapiens
STDMDKVLL

SEQ ID NO: 145952 - protein, 9 aa, Homo Sapiens
STDNGRIFL

SEQ ID NO: 145953 - protein, 9 aa, Homo Sapiens
STDQVGEFF

SEQ ID NO: 145954 - protein, 9 aa, Homo Sapiens
STDVHIINL

SEQ ID NO: 145955 - protein, 9 aa, Homo Sapiens
STDYETHEF

SEQ ID NO: 145956 - protein, 9 aa, Homo Sapiens
SVDDHIVRF

SEQ ID NO: 145957 - protein, 9 aa, Homo Sapiens
SVEDAAILL

SEQ ID NO: 145958 - protein, 9 aa, Homo Sapiens
SVPDEIILL

SEQ ID NO: 145959 - protein, 9 aa, Homo Sapiens
SYDSKLVWF

SEQ ID NO: 145960 - protein, 9 aa, Homo Sapiens
TADAFIVRF

SEQ ID NO: 145961 - protein, 9 aa, Homo Sapiens
TADAIARKL

SEQ ID NO: 145962 - protein, 9 aa, Homo Sapiens
TADDFLVFL

SEQ ID NO: 145963 - protein, 9 aa, Homo Sapiens
TADDPSLSL

SEQ ID NO: 145964 - protein, 9 aa, Homo Sapiens
TADEVHYFL

SEQ ID NO: 145965 - protein, 9 aa, Homo Sapiens
TADGRVVKL

SEQ ID NO: 145966 - protein, 9 aa, Homo Sapiens
TADIGCVLV

SEQ ID NO: 145967 - protein, 9 aa, Homo Sapiens
TADISDVWL

SEQ ID NO: 145968 - protein, 9 aa, Homo Sapiens
TADIVINLL

SEQ ID NO: 145969 - protein, 9 aa, Homo Sapiens
TFDDIVHSF

SEQ ID NO: 145970 - protein, 9 aa, Homo Sapiens
TFDDVAVTF

SEQ ID NO: 145971 - protein, 9 aa, Homo Sapiens
TFDEVLELM

SEQ ID NO: 145972 - protein, 9 aa, Homo Sapiens
TFDFVHNVM

SEQ ID NO: 145973 - protein, 9 aa, Homo Sapiens
TFDLQRIGF

SEQ ID NO: 145974 - protein, 9 aa, Homo Sapiens
TFDLTVVSY

SEQ ID NO: 145975 - protein, 9 aa, Homo Sapiens
TFDNVTSYL

SEQ ID NO: 145976 - protein, 9 aa, Homo Sapiens
TIDCGLVRL

SEQ ID NO: 145977 - protein, 9 aa, Homo Sapiens
TIEDAIAVL

SEQ ID NO: 145978 - protein, 9 aa, Homo Sapiens
TIEDGIFEV

SEQ ID NO: 145979 - protein, 9 aa, Homo Sapiens
TIPITPAFL

SEQ ID NO: 145980 - protein, 9 aa, Homo Sapiens
TSDGRVIFF

SEQ ID NO: 145981 - protein, 9 aa, Homo Sapiens
TSDPAEVLV

SEQ ID NO: 145982 - protein, 9 aa, Homo Sapiens
TSDPLELFL

SEQ ID NO: 145983 - protein, 9 aa, Homo Sapiens
TSDYLVVYL

SEQ ID NO: 145984 - protein, 9 aa, Homo Sapiens
TSPEAFLAL

SEQ ID NO: 145985 - protein, 9 aa, Homo Sapiens
TSPSYIDKL

SEQ ID NO: 145986 - protein, 9 aa, Homo Sapiens
TTDGYLLRL

SEQ ID NO: 145987 - protein, 9 aa, Homo Sapiens
TTDPMLAYL

SEQ ID NO: 145988 - protein, 9 aa, Homo Sapiens
TTEGIPVLI

SEQ ID NO: 145989 - protein, 9 aa, Homo Sapiens
TTEMMPVYL

SEQ ID NO: 145990 - protein, 9 aa, Homo Sapiens
TVDDLLSLK

SEQ ID NO: 145991 - protein, 9 aa, Homo Sapiens
TVPVRLSSL

SEQ ID NO: 145992 - protein, 9 aa, Homo Sapiens
VADAIRTSL

SEQ ID NO: 145993 - protein, 9 aa, Homo Sapiens
VADALILRV

SEQ ID NO: 145994 - protein, 9 aa, Homo Sapiens
VADDPIVMV

SEQ ID NO: 145995 - protein, 9 aa, Homo Sapiens
VADDTPVLL

SEQ ID NO: 145996 - protein, 9 aa, Homo Sapiens
VADEGICYL

SEQ ID NO: 145997 - protein, 9 aa, Homo Sapiens
VADELVAEF

SEQ ID NO: 145998 - protein, 9 aa, Homo Sapiens
VADELVSEF

SEQ ID NO: 145999 - protein, 9 aa, Homo Sapiens
VADEVCRIF

SEQ ID NO: 146000 - protein, 9 aa, Homo Sapiens
VADFGLARL

SEQ ID NO: 146001 - protein, 9 aa, Homo Sapiens
VADFGLITM

SEQ ID NO: 146002 - protein, 9 aa, Homo Sapiens
VADFGSATF

SEQ ID NO: 146003 - protein, 9 aa, Homo Sapiens
VADFSATYL

SEQ ID NO: 146004 - protein, 9 aa, Homo Sapiens
VADGLITTL

SEQ ID NO: 146005 - protein, 9 aa, Homo Sapiens
VADGLVTTL

SEQ ID NO: 146006 - protein, 9 aa, Homo Sapiens
VADGYPVRL

SEQ ID NO: 146007 - protein, 9 aa, Homo Sapiens
VADHPGIDF

SEQ ID NO: 146008 - protein, 9 aa, Homo Sapiens
VADKDTVLL

SEQ ID NO: 146009 - protein, 9 aa, Homo Sapiens
VADLAESIM

SEQ ID NO: 146010 - protein, 9 aa, Homo Sapiens
VADLLLVFI

SEQ ID NO: 146011 - protein, 9 aa, Homo Sapiens
VADLQLIDF

SEQ ID NO: 146012 - protein, 9 aa, Homo Sapiens
VADLREAIL

SEQ ID NO: 146013 - protein, 9 aa, Homo Sapiens
VADPIIYVL

SEQ ID NO: 146014 - protein, 9 aa, Homo Sapiens
VADPILYCF

SEQ ID NO: 146015 - protein, 9 aa, Homo Sapiens
VADPTPFHI

SEQ ID NO: 146016 - protein, 9 aa, Homo Sapiens
VADPVEAVL

SEQ ID NO: 146017 - protein, 9 aa, Homo Sapiens
VADPVYRTF

SEQ ID NO: 146018 - protein, 9 aa, Homo Sapiens
VADPYVVIM

SEQ ID NO: 146019 - protein, 9 aa, Homo Sapiens
VADQIVTKL

SEQ ID NO: 146020 - protein, 9 aa, Homo Sapiens
VADQSVILL

SEQ ID NO: 146021 - protein, 9 aa, Homo Sapiens
VADRLLVEL

SEQ ID NO: 146022 - protein, 9 aa, Homo Sapiens
VADTFQDYF

SEQ ID NO: 146023 - protein, 9 aa, Homo Sapiens
VADVLCEFL

SEQ ID NO: 146024 - protein, 9 aa, Homo Sapiens
VADVVVSRW

SEQ ID NO: 146025 - protein, 9 aa, Homo Sapiens
VAEAVATFL

SEQ ID NO: 146026 - protein, 9 aa, Homo Sapiens
VAETHIVLL

SEQ ID NO: 146027 - protein, 9 aa, Homo Sapiens
VAEYEPVLI

SEQ ID NO: 146028 - protein, 9 aa, Homo Sapiens
VFDCVVNSL

SEQ ID NO: 146029 - protein, 9 aa, Homo Sapiens
VFDCVVTSL

SEQ ID NO: 146030 - protein, 9 aa, Homo Sapiens
VFDDMINLL

SEQ ID NO: 146031 - protein, 9 aa, Homo Sapiens
VFDDTITEM

SEQ ID NO: 146032 - protein, 9 aa, Homo Sapiens
VFDDTLGSF

SEQ ID NO: 146033 - protein, 9 aa, Homo Sapiens
VFDEAIRAV

SEQ ID NO: 146034 - protein, 9 aa, Homo Sapiens
VFDEVVQIF

SEQ ID NO: 146035 - protein, 9 aa, Homo Sapiens
VFDIVIHRF

SEQ ID NO: 146036 - protein, 9 aa, Homo Sapiens
VFDKTLAEL

SEQ ID NO: 146037 - protein, 9 aa, Homo Sapiens
VFDLIQELF

SEQ ID NO: 146038 - protein, 9 aa, Homo Sapiens
VFDLTKEIF

SEQ ID NO: 146039 - protein, 9 aa, Homo Sapiens
VFDNVKDFF

SEQ ID NO: 146040 - protein, 9 aa, Homo Sapiens
VFDPALNLF

SEQ ID NO: 146041 - protein, 9 aa, Homo Sapiens
VFDPIANCW

SEQ ID NO: 146042 - protein, 9 aa, Homo Sapiens
VFDPVPVGV

SEQ ID NO: 146043 - protein, 9 aa, Homo Sapiens
VFDPVQKTL

SEQ ID NO: 146044 - protein, 9 aa, Homo Sapiens
VFDPVTKLW

SEQ ID NO: 146045 - protein, 9 aa, Homo Sapiens
VFDTAIAHL

SEQ ID NO: 146046 - protein, 9 aa, Homo Sapiens
VFDVIIRCF

SEQ ID NO: 146047 - protein, 9 aa, Homo Sapiens
VFDWIEANL

SEQ ID NO: 146048 - protein, 9 aa, Homo Sapiens
VGDGYVVHL

SEQ ID NO: 146049 - protein, 9 aa, Homo Sapiens
VGDLPNGRV

SEQ ID NO: 146050 - protein, 9 aa, Homo Sapiens
VGDPAVVFL

SEQ ID NO: 146051 - protein, 9 aa, Homo Sapiens
VGDPHTVTV

SEQ ID NO: 146052 - protein, 9 aa, Homo Sapiens
VGDTQVVVF

SEQ ID NO: 146053 - protein, 9 aa, Homo Sapiens
VIDKLVVHL

SEQ ID NO: 146054 - protein, 9 aa, Homo Sapiens
VIDPVPAAV

SEQ ID NO: 146055 - protein, 9 aa, Homo Sapiens
VIDVVPPKF

SEQ ID NO: 146056 - protein, 9 aa, Homo Sapiens
VIEDKTIEL

SEQ ID NO: 146057 - protein, 9 aa, Homo Sapiens
VIEINPYLL

SEQ ID NO: 146058 - protein, 9 aa, Homo Sapiens
VIPESVILL

SEQ ID NO: 146059 - protein, 9 aa, Homo Sapiens
VIPGYEELL

SEQ ID NO: 146060 - protein, 9 aa, Homo Sapiens
VIPTNVPEL

SEQ ID NO: 146061 - protein, 9 aa, Homo Sapiens
VLPNDPVFL

SEQ ID NO: 146062 - protein, 9 aa, Homo Sapiens
VMDSKIVQV

SEQ ID NO: 146063 - protein, 9 aa, Homo Sapiens
VQDLIEGHL

SEQ ID NO: 146064 - protein, 9 aa, Homo Sapiens
VQDPKVTYL

SEQ ID NO: 146065 - protein, 9 aa, Homo Sapiens
VRPNDEVTA

SEQ ID NO: 146066 - protein, 9 aa, Homo Sapiens
VSDGLIVMI

SEQ ID NO: 146067 - protein, 9 aa, Homo Sapiens
VSDHFPVEF

SEQ ID NO: 146068 - protein, 9 aa, Homo Sapiens
VSDICTIYL

SEQ ID NO: 146069 - protein, 9 aa, Homo Sapiens
VSDLGPVVL

SEQ ID NO: 146070 - protein, 9 aa, Homo Sapiens
VSDPVTVHF

SEQ ID NO: 146071 - protein, 9 aa, Homo Sapiens
VSTSHTTIS

SEQ ID NO: 146072 - protein, 9 aa, Homo Sapiens
VTDDLVCLV

SEQ ID NO: 146073 - protein, 9 aa, Homo Sapiens
VTDEVFNFL

SEQ ID NO: 146074 - protein, 9 aa, Homo Sapiens
VTDFISHLF

SEQ ID NO: 146075 - protein, 9 aa, Homo Sapiens
VTDFPSCYL

SEQ ID NO: 146076 - protein, 9 aa, Homo Sapiens
VTDGALVVV

SEQ ID NO: 146077 - protein, 9 aa, Homo Sapiens
VTDGKEVLL

SEQ ID NO: 146078 - protein, 9 aa, Homo Sapiens
VTDIHQLSF

SEQ ID NO: 146079 - protein, 9 aa, Homo Sapiens
VTDPRVVDL

SEQ ID NO: 146080 - protein, 9 aa, Homo Sapiens
VTDSCIVAL

SEQ ID NO: 146081 - protein, 9 aa, Homo Sapiens
VTDSHTVFI

SEQ ID NO: 146082 - protein, 9 aa, Homo Sapiens
VTDVGEVFV

SEQ ID NO: 146083 - protein, 9 aa, Homo Sapiens
VTDVGQILL

SEQ ID NO: 146084 - protein, 9 aa, Homo Sapiens
VTDVHPTLL

SEQ ID NO: 146085 - protein, 9 aa, Homo Sapiens
VTDVTSNLL

SEQ ID NO: 146086 - protein, 9 aa, Homo Sapiens
VTEEFGVHL

SEQ ID NO: 146087 - protein, 9 aa, Homo Sapiens
VTEEHVVTF

SEQ ID NO: 146088 - protein, 9 aa, Homo Sapiens
VTEGEVISL

SEQ ID NO: 146089 - protein, 9 aa, Homo Sapiens
VVDAIPVFL

SEQ ID NO: 146090 - protein, 9 aa, Homo Sapiens
VVDDEIYYF

SEQ ID NO: 146091 - protein, 9 aa, Homo Sapiens
VVDYKEVLL

SEQ ID NO: 146092 - protein, 9 aa, Homo Sapiens
VVEDVAWHL

SEQ ID NO: 146093 - protein, 9 aa, Homo Sapiens
VVPDHPVLL

SEQ ID NO: 146094 - protein, 9 aa, Homo Sapiens
VVPFLPSVL

SEQ ID NO: 146095 - protein, 9 aa, Homo Sapiens
VWDIVGTEL

SEQ ID NO: 146096 - protein, 9 aa, Homo Sapiens
VYDALNVLM

SEQ ID NO: 146097 - protein, 9 aa, Homo Sapiens
VYDLLKTNL

SEQ ID NO: 146098 - protein, 9 aa, Homo Sapiens
VYDLSIRGF

SEQ ID NO: 146099 - protein, 9 aa, Homo Sapiens
VYDVVEEKL

SEQ ID NO: 146100 - protein, 9 aa, Homo Sapiens
VYDVVELKF

SEQ ID NO: 146101 - protein, 9 aa, Homo Sapiens
YADFAPSLL

SEQ ID NO: 146102 - protein, 9 aa, Homo Sapiens
YADHPFIFL

SEQ ID NO: 146103 - protein, 9 aa, Homo Sapiens
YADIEAAWL

SEQ ID NO: 146104 - protein, 9 aa, Homo Sapiens
YADIFLRNV

SEQ ID NO: 146105 - protein, 9 aa, Homo Sapiens
YADIFPSKV

SEQ ID NO: 146106 - protein, 9 aa, Homo Sapiens
YAEEFRTYL

SEQ ID NO: 146107 - protein, 9 aa, Homo Sapiens
YAEVGRVLL

SEQ ID NO: 146108 - protein, 9 aa, Homo Sapiens
YFDAIPVTM

SEQ ID NO: 146109 - protein, 9 aa, Homo Sapiens
YFDDALEDF

SEQ ID NO: 146110 - protein, 9 aa, Homo Sapiens
YFDEILNKL

SEQ ID NO: 146111 - protein, 9 aa, Homo Sapiens
YFDEPVELR

SEQ ID NO: 146112 - protein, 9 aa, Homo Sapiens
YFDLLGELM

SEQ ID NO: 146113 - protein, 9 aa, Homo Sapiens
YFDLQLLVF

SEQ ID NO: 146114 - protein, 9 aa, Homo Sapiens
YFDLQTHVI

SEQ ID NO: 146115 - protein, 9 aa, Homo Sapiens
YFDNILNSF

SEQ ID NO: 146116 - protein, 9 aa, Homo Sapiens
YFDPANGKF

SEQ ID NO: 146117 - protein, 9 aa, Homo Sapiens
YFDPQYFEF

SEQ ID NO: 146118 - protein, 9 aa, Homo Sapiens
YFDPTIVSV

SEQ ID NO: 146119 - protein, 9 aa, Homo Sapiens
YFDQVLVNI

SEQ ID NO: 146120 - protein, 9 aa, Homo Sapiens
YFDVMLENF

SEQ ID NO: 146121 - protein, 9 aa, Homo Sapiens
YFEELITML

SEQ ID NO: 146122 - protein, 9 aa, Homo Sapiens
YFPDKVALL

SEQ ID NO: 146123 - protein, 9 aa, Homo Sapiens
YGDCHPVFF

SEQ ID NO: 146124 - protein, 9 aa, Homo Sapiens
YGDSLVVLV

SEQ ID NO: 146125 - protein, 9 aa, Homo Sapiens
YIDDLVVIL

SEQ ID NO: 146126 - protein, 9 aa, Homo Sapiens
YIDLPPPRL

SEQ ID NO: 146127 - protein, 9 aa, Homo Sapiens
YIDRGVVFV

SEQ ID NO: 146128 - protein, 9 aa, Homo Sapiens
YIPNKVLIL

SEQ ID NO: 146129 - protein, 9 aa, Homo Sapiens
YLDNGVVFV

SEQ ID NO: 146130 - protein, 9 aa, Homo Sapiens
YLEDSPLEL

SEQ ID NO: 146131 - protein, 9 aa, Homo Sapiens
YLPDFLDYF

SEQ ID NO: 146132 - protein, 9 aa, Homo Sapiens
YNDPIYVKL

SEQ ID NO: 146133 - protein, 9 aa, Homo Sapiens
YSDDIPHAL

SEQ ID NO: 146134 - protein, 9 aa, Homo Sapiens
YTDATPLRV

SEQ ID NO: 146135 - protein, 9 aa, Homo Sapiens
YTDIQEPML

SEQ ID NO: 146136 - protein, 9 aa, Homo Sapiens
YTDKIMTYL

SEQ ID NO: 146137 - protein, 9 aa, Homo Sapiens
YTDLPNRQL

SEQ ID NO: 146138 - protein, 9 aa, Homo Sapiens
YTDNLVRVW

SEQ ID NO: 146139 - protein, 9 aa, Homo Sapiens
YTDTKMILF

SEQ ID NO: 146140 - protein, 9 aa, Homo Sapiens
YTDVNIVTI

SEQ ID NO: 146141 - protein, 9 aa, Homo Sapiens
YTDVTPRQF

SEQ ID NO: 146142 - protein, 9 aa, Homo Sapiens
YTELNIVNL

SEQ ID NO: 146143 - protein, 9 aa, Homo Sapiens
YTEMDPVII

SEQ ID NO: 146144 - protein, 9 aa, Homo Sapiens
YTIEILKVE

SEQ ID NO: 146145 - protein, 9 aa, Homo Sapiens
YVDDGLISL

SEQ ID NO: 146146 - protein, 9 aa, Homo Sapiens
YVDDVISRI

SEQ ID NO: 146147 - protein, 9 aa, Homo Sapiens
YVDEGEVYF

SEQ ID NO: 146148 - protein, 9 aa, Homo Sapiens
YVDGRVLVV

SEQ ID NO: 146149 - protein, 9 aa, Homo Sapiens
YVDVVKVLL

SEQ ID NO: 146150 - protein, 9 aa, Homo Sapiens
YVPAEVCRL

SEQ ID NO: 146151 - protein, 9 aa, Homo Sapiens
YVPDSPALL

SEQ ID NO: 146152 - protein, 9 aa, Homo Sapiens
YVQDYEDFM

SEQ ID NO: 146153 - protein, 9 aa, Homo Sapiens
YYDEIINAL

SEQ ID NO: 146154 - protein, 9 aa, Homo Sapiens
YYDEKVVKL

SEQ ID NO: 146155 - protein, 9 aa, Homo Sapiens
YYDLVKAFM

SEQ ID NO: 146156 - protein, 9 aa, Homo Sapiens
YYDLVRTEI

SEQ ID NO: 146157 - protein, 9 aa, Homo Sapiens
YYDPKHVIF

SEQ ID NO: 146158 - protein, 9 aa, Homo Sapiens
YYDVAKQLL

SEQ ID NO: 146159 - protein, 9 aa, Homo Sapiens
YYDVPIATL

SEQ ID NO: 146160 - protein, 10 aa, Homo Sapiens
AADPGLPARL

SEQ ID NO: 146161 - protein, 10 aa, Homo Sapiens
AFDVVERSFL

SEQ ID NO: 146162 - protein, 10 aa, Homo Sapiens
AQFIDKPVCF

SEQ ID NO: 146163 - protein, 10 aa, Homo Sapiens
DAAVIPIKNN

SEQ ID NO: 146164 - protein, 10 aa, Homo Sapiens
DANMDELLDL

SEQ ID NO: 146165 - protein, 10 aa, Homo Sapiens
FADPVDVNPF

SEQ ID NO: 146166 - protein, 10 aa, Homo Sapiens
FADVAVYFSP

SEQ ID NO: 146167 - protein, 10 aa, Homo Sapiens
FFDATDRVSF

SEQ ID NO: 146168 - protein, 10 aa, Homo Sapiens
FFDDVGAVTL

SEQ ID NO: 146169 - protein, 10 aa, Homo Sapiens
FFDPNTHENL

SEQ ID NO: 146170 - protein, 10 aa, Homo Sapiens
FFDPSLLHLL

SEQ ID NO: 146171 - protein, 10 aa, Homo Sapiens
FLPARFYQAL

SEQ ID NO: 146172 - protein, 10 aa, Homo Sapiens
FLSEHPNVTL

SEQ ID NO: 146173 - protein, 10 aa, Homo Sapiens
FMEAIAPPLL

SEQ ID NO: 146174 - protein, 10 aa, Homo Sapiens
FTDCYGYHDF

SEQ ID NO: 146175 - protein, 10 aa, Homo Sapiens
FTDEESRVFL

SEQ ID NO: 146176 - protein, 10 aa, Homo Sapiens
FTDQATVERF

SEQ ID NO: 146177 - protein, 10 aa, Homo Sapiens
FTDSLITRNF

SEQ ID NO: 146178 - protein, 10 aa, Homo Sapiens
FTDTDCVVRF

SEQ ID NO: 146179 - protein, 10 aa, Homo Sapiens
FVDDGTETHF

SEQ ID NO: 146180 - protein, 10 aa, Homo Sapiens
FVDSGAPPAL

SEQ ID NO: 146181 - protein, 10 aa, Homo Sapiens
GDLPNGRVCP

SEQ ID NO: 146182 - protein, 10 aa, Homo Sapiens
HLHNMPPSAL

SEQ ID NO: 146183 - protein, 10 aa, Homo Sapiens
IADLAHLLLF

SEQ ID NO: 146184 - protein, 10 aa, Homo Sapiens
IADNRPSVEF

SEQ ID NO: 146185 - protein, 10 aa, Homo Sapiens
IFDLQSNTVL

SEQ ID NO: 146186 - protein, 10 aa, Homo Sapiens
IFDVVDGTYV

SEQ ID NO: 146187 - protein, 10 aa, Homo Sapiens
IGEDIFPPLL

SEQ ID NO: 146188 - protein, 10 aa, Homo Sapiens
IIDDPSGNSF

SEQ ID NO: 146189 - protein, 10 aa, Homo Sapiens
IIDTPGHESF

SEQ ID NO: 146190 - protein, 10 aa, Homo Sapiens
IIDTPGHVDF

SEQ ID NO: 146191 - protein, 10 aa, Homo Sapiens
IIEEHPPLML

SEQ ID NO: 146192 - protein, 10 aa, Homo Sapiens
ILDDVSLTHL

SEQ ID NO: 146193 - protein, 10 aa, Homo Sapiens
IQNAVNGVKQ

SEQ ID NO: 146194 - protein, 10 aa, Homo Sapiens
ITDPDVVHIW

SEQ ID NO: 146195 - protein, 10 aa, Homo Sapiens
ITDPEVVFVA

SEQ ID NO: 146196 - protein, 10 aa, Homo Sapiens
KADGIVSKNF

SEQ ID NO: 146197 - protein, 10 aa, Homo Sapiens
LEGLALPHDL

SEQ ID NO: 146198 - protein, 10 aa, Homo Sapiens
LLGLFGYLVF

SEQ ID NO: 146199 - protein, 10 aa, Homo Sapiens
LTDPAIVKVF

SEQ ID NO: 146200 - protein, 10 aa, Homo Sapiens
PKWVGDLPNG

SEQ ID NO: 146201 - protein, 10 aa, Homo Sapiens
QLHHNPGEET

SEQ ID NO: 146202 - protein, 10 aa, Homo Sapiens
RPNDEVTAVL

SEQ ID NO: 146203 - protein, 10 aa, Homo Sapiens
RSDVPSLVTF

SEQ ID NO: 146204 - protein, 10 aa, Homo Sapiens
SQAGDRIFFV

SEQ ID NO: 146205 - protein, 10 aa, Homo Sapiens
SVRPNDEVTA

SEQ ID NO: 146206 - protein, 10 aa, Homo Sapiens
SYDPTIENTF

SEQ ID NO: 146207 - protein, 10 aa, Homo Sapiens
TFDETVSTYV

SEQ ID NO: 146208 - protein, 10 aa, Homo Sapiens
TIPIVPTAEF

SEQ ID NO: 146209 - protein, 10 aa, Homo Sapiens
VADPDNPLVL

SEQ ID NO: 146210 - protein, 10 aa, Homo Sapiens
VADPYVVIMS

SEQ ID NO: 146211 - protein, 10 aa, Homo Sapiens
VAETHIVLLF

SEQ ID NO: 146212 - protein, 10 aa, Homo Sapiens
VAPEEHPVLL

SEQ ID NO: 146213 - protein, 10 aa, Homo Sapiens
VDGGWYPVIL

SEQ ID NO: 146214 - protein, 10 aa, Homo Sapiens
VFDEAIRAVL

SEQ ID NO: 146215 - protein, 10 aa, Homo Sapiens
VFDIVTSQIF

SEQ ID NO: 146216 - protein, 10 aa, Homo Sapiens
VFDMGAEVGF

SEQ ID NO: 146217 - protein, 10 aa, Homo Sapiens
VFDPVQKTLL

SEQ ID NO: 146218 - protein, 10 aa, Homo Sapiens
VFDTAIAHLF

SEQ ID NO: 146219 - protein, 10 aa, Homo Sapiens
VFDVFLVEGY

SEQ ID NO: 146220 - protein, 10 aa, Homo Sapiens
VFDVLDGEEM

SEQ ID NO: 146221 - protein, 10 aa, Homo Sapiens
VFDVTAPNTF

SEQ ID NO: 146222 - protein, 10 aa, Homo Sapiens
VGDLEDCLLN

SEQ ID NO: 146223 - protein, 10 aa, Homo Sapiens
VGDLPNGRVC

SEQ ID NO: 146224 - protein, 10 aa, Homo Sapiens
VRPNDEVTAV

SEQ ID NO: 146225 - protein, 10 aa, Homo Sapiens
VSDDSLGSLL

SEQ ID NO: 146226 - protein, 10 aa, Homo Sapiens
VTDDLVCLVY

SEQ ID NO: 146227 - protein, 10 aa, Homo Sapiens
VTDEFLSDFL

SEQ ID NO: 146228 - protein, 10 aa, Homo Sapiens
VTDEPVYIDL

SEQ ID NO: 146229 - protein, 10 aa, Homo Sapiens
VTDPRVVDLL

SEQ ID NO: 146230 - protein, 10 aa, Homo Sapiens
VTEGGEPYRL

SEQ ID NO: 146231 - protein, 10 aa, Homo Sapiens
VVTSHQAPGE

SEQ ID NO: 146232 - protein, 10 aa, Homo Sapiens
WVGDLPNGRV

SEQ ID NO: 146233 - protein, 10 aa, Homo Sapiens
YADPGAEVKI

SEQ ID NO: 146234 - protein, 10 aa, Homo Sapiens
YVDDTQFVRF

SEQ ID NO: 146235 - protein, 10 aa, Homo Sapiens
YVDGPASTAF

SEQ ID NO: 146236 - protein, 11 aa, Homo Sapiens
DDAAVIPIKNN

SEQ ID NO: 146237 - protein, 11 aa, Homo Sapiens
DESLQVAERLT

SEQ ID NO: 146238 - protein, 11 aa, Homo Sapiens
DVSSFNPHGIS

SEQ ID NO: 146239 - protein, 11 aa, Homo Sapiens
EIQNAVNGVKQ

SEQ ID NO: 146240 - protein, 11 aa, Homo Sapiens
FFDPSLLHLLY

SEQ ID NO: 146241 - protein, 11 aa, Homo Sapiens
FTDEGVPKFLS

SEQ ID NO: 146242 - protein, 11 aa, Homo Sapiens
FYDPDTSIIYL

SEQ ID NO: 146243 - protein, 11 aa, Homo Sapiens
FYEPQKGSIYL

SEQ ID NO: 146244 - protein, 11 aa, Homo Sapiens
GADNSVVRFLP

SEQ ID NO: 146245 - protein, 11 aa, Homo Sapiens
HSPAFQHPPTE

SEQ ID NO: 146246 - protein, 11 aa, Homo Sapiens
IADLSNIINKL

SEQ ID NO: 146247 - protein, 11 aa, Homo Sapiens
IADPSAYGIYI

SEQ ID NO: 146248 - protein, 11 aa, Homo Sapiens
IIDLEQTATHL

SEQ ID NO: 146249 - protein, 11 aa, Homo Sapiens
ITDGSTPINLF

SEQ ID NO: 146250 - protein, 11 aa, Homo Sapiens
KELEMLLMSAE

SEQ ID NO: 146251 - protein, 11 aa, Homo Sapiens
LCDGQLEGAEI

SEQ ID NO: 146252 - protein, 11 aa, Homo Sapiens
LLPEELTPLIL

SEQ ID NO: 146253 - protein, 11 aa, Homo Sapiens
MAPSETQFSHL

SEQ ID NO: 146254 - protein, 11 aa, Homo Sapiens
NFDVGHVPIRL

SEQ ID NO: 146255 - protein, 11 aa, Homo Sapiens
QDNTRKIIIKN

SEQ ID NO: 146256 - protein, 11 aa, Homo Sapiens
QDSQLQKARED

SEQ ID NO: 146257 - protein, 11 aa, Homo Sapiens
QKADIEEIKSG

SEQ ID NO: 146258 - protein, 11 aa, Homo Sapiens
QPTDSDIPSFL

SEQ ID NO: 146259 - protein, 11 aa, Homo Sapiens
SVRPNDEVTAV

SEQ ID NO: 146260 - protein, 11 aa, Homo Sapiens
TFDVAPSRLDF

SEQ ID NO: 146261 - protein, 11 aa, Homo Sapiens
VADPYVVIMSA

SEQ ID NO: 146262 - protein, 11 aa, Homo Sapiens
VGDLPNGRVCP

SEQ ID NO: 146263 - protein, 11 aa, Homo Sapiens
VGEVPAVGARA

SEQ ID NO: 146264 - protein, 11 aa, Homo Sapiens
VGEVTSTSKYC

SEQ ID NO: 146265 - protein, 11 aa, Homo Sapiens
VLDVDLVCEAL

SEQ ID NO: 146266 - protein, 11 aa, Homo Sapiens
VTEGGEPYRLY

SEQ ID NO: 146267 - protein, 11 aa, Homo Sapiens
VVVTSHQAPGE

SEQ ID NO: 146268 - protein, 11 aa, Homo Sapiens
WVGDLPNGRVC

SEQ ID NO: 146269 - protein, 11 aa, Homo Sapiens
YTDGPLMPSDF

SEQ ID NO: 146270 - protein, 8 aa, Homo Sapiens
AADAGTFL

SEQ ID NO: 146271 - protein, 8 aa, Homo Sapiens
AADEPSSL

SEQ ID NO: 146272 - protein, 8 aa, Homo Sapiens
AADEPVTV

SEQ ID NO: 146273 - protein, 8 aa, Homo Sapiens
AADFTAKV

SEQ ID NO: 146274 - protein, 8 aa, Homo Sapiens
AADGGPKL

SEQ ID NO: 146275 - protein, 8 aa, Homo Sapiens
AADGPQKL

SEQ ID NO: 146276 - protein, 8 aa, Homo Sapiens
AADGSVKL

SEQ ID NO: 146277 - protein, 8 aa, Homo Sapiens
AADGTVEL

SEQ ID NO: 146278 - protein, 8 aa, Homo Sapiens
AADGVIRL

SEQ ID NO: 146279 - protein, 8 aa, Homo Sapiens
AADIASKV

SEQ ID NO: 146280 - protein, 8 aa, Homo Sapiens
AADIPINI

SEQ ID NO: 146281 - protein, 8 aa, Homo Sapiens
AADLGSVV

SEQ ID NO: 146282 - protein, 8 aa, Homo Sapiens
AADNQIYI

SEQ ID NO: 146283 - protein, 8 aa, Homo Sapiens
AADSAVRL

SEQ ID NO: 146284 - protein, 8 aa, Homo Sapiens
AADTPAIM

SEQ ID NO: 146285 - protein, 8 aa, Homo Sapiens
AADTVVIF

SEQ ID NO: 146286 - protein, 8 aa, Homo Sapiens
AGDGDVKL

SEQ ID NO: 146287 - protein, 8 aa, Homo Sapiens
AGDHPVEL

SEQ ID NO: 146288 - protein, 8 aa, Homo Sapiens
AGDKPATF

SEQ ID NO: 146289 - protein, 8 aa, Homo Sapiens
AIDSPVSF

SEQ ID NO: 146290 - protein, 8 aa, Homo Sapiens
AIDTEERL

SEQ ID NO: 146291 - protein, 8 aa, Homo Sapiens
AIDTESRL

SEQ ID NO: 146292 - protein, 8 aa, Homo Sapiens
ALDKATVL

SEQ ID NO: 146293 - protein, 8 aa, Homo Sapiens
ALDTPVMV

SEQ ID NO: 146294 - protein, 8 aa, Homo Sapiens
AQDFKTDL

SEQ ID NO: 146295 - protein, 8 aa, Homo Sapiens
AQDQPVKM

SEQ ID NO: 146296 - protein, 8 aa, Homo Sapiens
ASDAAAFL

SEQ ID NO: 146297 - protein, 8 aa, Homo Sapiens
ASDDPEKL

SEQ ID NO: 146298 - protein, 8 aa, Homo Sapiens
ASDEVTRL

SEQ ID NO: 146299 - protein, 8 aa, Homo Sapiens
ASDGTVRL

SEQ ID NO: 146300 - protein, 8 aa, Homo Sapiens
ASDVAQHL

SEQ ID NO: 146301 - protein, 8 aa, Homo Sapiens
ASDVHGNF

SEQ ID NO: 146302 - protein, 8 aa, Homo Sapiens
AVDDPAAI

SEQ ID NO: 146303 - protein, 8 aa, Homo Sapiens
AVDEPQML

SEQ ID NO: 146304 - protein, 8 aa, Homo Sapiens
AVDREARL

SEQ ID NO: 146305 - protein, 8 aa, Homo Sapiens
AVDSVVSL

SEQ ID NO: 146306 - protein, 8 aa, Homo Sapiens
AVDTSSEI

SEQ ID NO: 146307 - protein, 8 aa, Homo Sapiens
EIDHAVHL

SEQ ID NO: 146308 - protein, 8 aa, Homo Sapiens
ESLIACKA

SEQ ID NO: 146309 - protein, 8 aa, Homo Sapiens
ETDTPAQL

SEQ ID NO: 146310 - protein, 8 aa, Homo Sapiens
ETEDPRLL

SEQ ID NO: 146311 - protein, 8 aa, Homo Sapiens
FADAHSNL

SEQ ID NO: 146312 - protein, 8 aa, Homo Sapiens
FADATVEL

SEQ ID NO: 146313 - protein, 8 aa, Homo Sapiens
FADAVQEL

SEQ ID NO: 146314 - protein, 8 aa, Homo Sapiens
FADDMQEF

SEQ ID NO: 146315 - protein, 8 aa, Homo Sapiens
FADIGNTV

SEQ ID NO: 146316 - protein, 8 aa, Homo Sapiens
FADKHIQV

SEQ ID NO: 146317 - protein, 8 aa, Homo Sapiens
FADNVSGL

SEQ ID NO: 146318 - protein, 8 aa, Homo Sapiens
FADYVSTM

SEQ ID NO: 146319 - protein, 8 aa, Homo Sapiens
FAEGITKI

SEQ ID NO: 146320 - protein, 8 aa, Homo Sapiens
FAERVTSL

SEQ ID NO: 146321 - protein, 8 aa, Homo Sapiens
FGDKDSKL

SEQ ID NO: 146322 - protein, 8 aa, Homo Sapiens
FGDSEPEL

SEQ ID NO: 146323 - protein, 8 aa, Homo Sapiens
FGDVSSRL

SEQ ID NO: 146324 - protein, 8 aa, Homo Sapiens
FIDKPVCF

SEQ ID NO: 146325 - protein, 8 aa, Homo Sapiens
FIDKQTNL

SEQ ID NO: 146326 - protein, 8 aa, Homo Sapiens
FIDQSQSL

SEQ ID NO: 146327 - protein, 8 aa, Homo Sapiens
FIDTAQHM

SEQ ID NO: 146328 - protein, 8 aa, Homo Sapiens
FIDTTSKF

SEQ ID NO: 146329 - protein, 8 aa, Homo Sapiens
FLDDPQAV

SEQ ID NO: 146330 - protein, 8 aa, Homo Sapiens
FLDEEVKL

SEQ ID NO: 146331 - protein, 8 aa, Homo Sapiens
FLDKALEL

SEQ ID NO: 146332 - protein, 8 aa, Homo Sapiens
FLDVVSKL

SEQ ID NO: 146333 - protein, 8 aa, Homo Sapiens
FLEDPSVL

SEQ ID NO: 146334 - protein, 8 aa, Homo Sapiens
FMDQHPEM

SEQ ID NO: 146335 - protein, 8 aa, Homo Sapiens
FQDGATKL

SEQ ID NO: 146336 - protein, 8 aa, Homo Sapiens
FQDKASEL

SEQ ID NO: 146337 - protein, 8 aa, Homo Sapiens
FSDGAVSL

SEQ ID NO: 146338 - protein, 8 aa, Homo Sapiens
FSDGDAKL

SEQ ID NO: 146339 - protein, 8 aa, Homo Sapiens
FSDGITSV

SEQ ID NO: 146340 - protein, 8 aa, Homo Sapiens
FSDSHNAL

SEQ ID NO: 146341 - protein, 8 aa, Homo Sapiens
FSDTEAAM

SEQ ID NO: 146342 - protein, 8 aa, Homo Sapiens
FTDEESRV

SEQ ID NO: 146343 - protein, 8 aa, Homo Sapiens
FTDSAIAM

SEQ ID NO: 146344 - protein, 8 aa, Homo Sapiens
FTDTVIRI

SEQ ID NO: 146345 - protein, 8 aa, Homo Sapiens
FVDAITEL

SEQ ID NO: 146346 - protein, 8 aa, Homo Sapiens
FVDDETKL

SEQ ID NO: 146347 - protein, 8 aa, Homo Sapiens
FVDGVSTV

SEQ ID NO: 146348 - protein, 8 aa, Homo Sapiens
GADEPQRL

SEQ ID NO: 146349 - protein, 8 aa, Homo Sapiens
GADKSVKF

SEQ ID NO: 146350 - protein, 8 aa, Homo Sapiens
GADVVSKF

SEQ ID NO: 146351 - protein, 8 aa, Homo Sapiens
GIDRPAEL

SEQ ID NO: 146352 - protein, 8 aa, Homo Sapiens
HADLEIRL

SEQ ID NO: 146353 - protein, 8 aa, Homo Sapiens
HADSVTGL

SEQ ID NO: 146354 - protein, 8 aa, Homo Sapiens
HADVAQLL

SEQ ID NO: 146355 - protein, 8 aa, Homo Sapiens
HADVGKEL

SEQ ID NO: 146356 - protein, 8 aa, Homo Sapiens
HGDSAMHL

SEQ ID NO: 146357 - protein, 8 aa, Homo Sapiens
HIDHPVMV

SEQ ID NO: 146358 - protein, 8 aa, Homo Sapiens
HIDNDVKL

SEQ ID NO: 146359 - protein, 8 aa, Homo Sapiens
HLDKASVM

SEQ ID NO: 146360 - protein, 8 aa, Homo Sapiens
HLDQEQQL

SEQ ID NO: 146361 - protein, 8 aa, Homo Sapiens
HLDTHSGL

SEQ ID NO: 146362 - protein, 8 aa, Homo Sapiens
HQDEAVVL

SEQ ID NO: 146363 - protein, 8 aa, Homo Sapiens
HSDELTSL

SEQ ID NO: 146364 - protein, 8 aa, Homo Sapiens
HSDGSVSL

SEQ ID NO: 146365 - protein, 8 aa, Homo Sapiens
HSDNPSQL

SEQ ID NO: 146366 - protein, 8 aa, Homo Sapiens
HTDLPVSV

SEQ ID NO: 146367 - protein, 8 aa, Homo Sapiens
HTDTTVKF

SEQ ID NO: 146368 - protein, 8 aa, Homo Sapiens
HVDAHATL

SEQ ID NO: 146369 - protein, 8 aa, Homo Sapiens
HVDECVEF

SEQ ID NO: 146370 - protein, 8 aa, Homo Sapiens
HVDNETEL

SEQ ID NO: 146371 - protein, 8 aa, Homo Sapiens
HVTLSIKH

SEQ ID NO: 146372 - protein, 8 aa, Homo Sapiens
IADDFAAF

SEQ ID NO: 146373 - protein, 8 aa, Homo Sapiens
IADHCPTL

SEQ ID NO: 146374 - protein, 8 aa, Homo Sapiens
IADHYMQV

SEQ ID NO: 146375 - protein, 8 aa, Homo Sapiens
IADLAHLL

SEQ ID NO: 146376 - protein, 8 aa, Homo Sapiens
IADLQQKL

SEQ ID NO: 146377 - protein, 8 aa, Homo Sapiens
IADQITLL

SEQ ID NO: 146378 - protein, 8 aa, Homo Sapiens
IADREQRL

SEQ ID NO: 146379 - protein, 8 aa, Homo Sapiens
IADRPLYL

SEQ ID NO: 146380 - protein, 8 aa, Homo Sapiens
IADSHPEM

SEQ ID NO: 146381 - protein, 8 aa, Homo Sapiens
IADSHQNF

SEQ ID NO: 146382 - protein, 8 aa, Homo Sapiens
IADTGANV

SEQ ID NO: 146383 - protein, 8 aa, Homo Sapiens
IADTMVQI

SEQ ID NO: 146384 - protein, 8 aa, Homo Sapiens
IADVHLVE

SEQ ID NO: 146385 - protein, 8 aa, Homo Sapiens
IADVSTGL

SEQ ID NO: 146386 - protein, 8 aa, Homo Sapiens
IGDDSMKV

SEQ ID NO: 146387 - protein, 8 aa, Homo Sapiens
IGDTSGHF

SEQ ID NO: 146388 - protein, 8 aa, Homo Sapiens
IIDDHPEV

SEQ ID NO: 146389 - protein, 8 aa, Homo Sapiens
IIDDRVIL

SEQ ID NO: 146390 - protein, 8 aa, Homo Sapiens
IIDGTSEM

SEQ ID NO: 146391 - protein, 8 aa, Homo Sapiens
IIDKEVSL

SEQ ID NO: 146392 - protein, 8 aa, Homo Sapiens
IIDTPGIL

SEQ ID NO: 146393 - protein, 8 aa, Homo Sapiens
IIEEPSRL

SEQ ID NO: 146394 - protein, 8 aa, Homo Sapiens
ILDDSVEM

SEQ ID NO: 146395 - protein, 8 aa, Homo Sapiens
ILDEAVEL

SEQ ID NO: 146396 - protein, 8 aa, Homo Sapiens
ILDKPQSI

SEQ ID NO: 146397 - protein, 8 aa, Homo Sapiens
IQDQPVAL

SEQ ID NO: 146398 - protein, 8 aa, Homo Sapiens
IQDQSVEV

SEQ ID NO: 146399 - protein, 8 aa, Homo Sapiens
ISDHEATL

SEQ ID NO: 146400 - protein, 8 aa, Homo Sapiens
ISDIDKKL

SEQ ID NO: 146401 - protein, 8 aa, Homo Sapiens
ISDKDLEL

SEQ ID NO: 146402 - protein, 8 aa, Homo Sapiens
ISDKDQQL

SEQ ID NO: 146403 - protein, 8 aa, Homo Sapiens
ISDSPIGV

SEQ ID NO: 146404 - protein, 8 aa, Homo Sapiens
ISDYAVKI

SEQ ID NO: 146405 - protein, 8 aa, Homo Sapiens
ITDDSTSL

SEQ ID NO: 146406 - protein, 8 aa, Homo Sapiens
ITDLEERL

SEQ ID NO: 146407 - protein, 8 aa, Homo Sapiens
ITDLYTDL

SEQ ID NO: 146408 - protein, 8 aa, Homo Sapiens
ITDSPVVV

SEQ ID NO: 146409 - protein, 8 aa, Homo Sapiens
ITDTLQEL

SEQ ID NO: 146410 - protein, 8 aa, Homo Sapiens
IVDDEATL

SEQ ID NO: 146411 - protein, 8 aa, Homo Sapiens
IVDEASQI

SEQ ID NO: 146412 - protein, 8 aa, Homo Sapiens
IVDEDVKL

SEQ ID NO: 146413 - protein, 8 aa, Homo Sapiens
IVDEGALL

SEQ ID NO: 146414 - protein, 8 aa, Homo Sapiens
IVDRPVTL

SEQ ID NO: 146415 - protein, 8 aa, Homo Sapiens
KAAFKELQ

SEQ ID NO: 146416 - protein, 8 aa, Homo Sapiens
KADAIVKM

SEQ ID NO: 146417 - protein, 8 aa, Homo Sapiens
KADKDYHF

SEQ ID NO: 146418 - protein, 8 aa, Homo Sapiens
KADKVTML

SEQ ID NO: 146419 - protein, 8 aa, Homo Sapiens
KADNVVNI

SEQ ID NO: 146420 - protein, 8 aa, Homo Sapiens
KMDESTLL

SEQ ID NO: 146421 - protein, 8 aa, Homo Sapiens
KQDEPIDL

SEQ ID NO: 146422 - protein, 8 aa, Homo Sapiens
KSDLHPTL

SEQ ID NO: 146423 - protein, 8 aa, Homo Sapiens
KSDVEAIF

SEQ ID NO: 146424 - protein, 8 aa, Homo Sapiens
KVDEIVVL

SEQ ID NO: 146425 - protein, 8 aa, Homo Sapiens
KVDQEVKL

SEQ ID NO: 146426 - protein, 8 aa, Homo Sapiens
LADALQEL

SEQ ID NO: 146427 - protein, 8 aa, Homo Sapiens
LADAVVKI

SEQ ID NO: 146428 - protein, 8 aa, Homo Sapiens
LADFAELI

SEQ ID NO: 146429 - protein, 8 aa, Homo Sapiens
LADGGVKM

SEQ ID NO: 146430 - protein, 8 aa, Homo Sapiens
LADGSSRL

SEQ ID NO: 146431 - protein, 8 aa, Homo Sapiens
LADGVQKV

SEQ ID NO: 146432 - protein, 8 aa, Homo Sapiens
LADIAQKL

SEQ ID NO: 146433 - protein, 8 aa, Homo Sapiens
LADKGAKL

SEQ ID NO: 146434 - protein, 8 aa, Homo Sapiens
LADKSVLV

SEQ ID NO: 146435 - protein, 8 aa, Homo Sapiens
LADQCTGL

SEQ ID NO: 146436 - protein, 8 aa, Homo Sapiens
LADQEVRL

SEQ ID NO: 146437 - protein, 8 aa, Homo Sapiens
LADVATVL

SEQ ID NO: 146438 - protein, 8 aa, Homo Sapiens
LIDKPTNL

SEQ ID NO: 146439 - protein, 8 aa, Homo Sapiens
LLDSCTKL

SEQ ID NO: 146440 - protein, 8 aa, Homo Sapiens
LSDDGVDL

SEQ ID NO: 146441 - protein, 8 aa, Homo Sapiens
LSDGIQEL

SEQ ID NO: 146442 - protein, 8 aa, Homo Sapiens
LSDGVAVL

SEQ ID NO: 146443 - protein, 8 aa, Homo Sapiens
LSDLSTKL

SEQ ID NO: 146444 - protein, 8 aa, Homo Sapiens
LSDPSSRL

SEQ ID NO: 146445 - protein, 8 aa, Homo Sapiens
LSDTVQHL

SEQ ID NO: 146446 - protein, 8 aa, Homo Sapiens
LSDVAEKL

SEQ ID NO: 146447 - protein, 8 aa, Homo Sapiens
LTDEQVAL

SEQ ID NO: 146448 - protein, 8 aa, Homo Sapiens
LTDTDAAI

SEQ ID NO: 146449 - protein, 8 aa, Homo Sapiens
LVDHVAEL

SEQ ID NO: 146450 - protein, 8 aa, Homo Sapiens
LVDTTVEL

SEQ ID NO: 146451 - protein, 8 aa, Homo Sapiens
MADSGESL

SEQ ID NO: 146452 - protein, 8 aa, Homo Sapiens
MPDSAAAL

SEQ ID NO: 146453 - protein, 8 aa, Homo Sapiens
MPDSPAEV

SEQ ID NO: 146454 - protein, 8 aa, Homo Sapiens
MSDLPVKV

SEQ ID NO: 146455 - protein, 8 aa, Homo Sapiens
NADEARSL

SEQ ID NO: 146456 - protein, 8 aa, Homo Sapiens
NADIVTLL

SEQ ID NO: 146457 - protein, 8 aa, Homo Sapiens
NADKVLEL

SEQ ID NO: 146458 - protein, 8 aa, Homo Sapiens
NADQPLRV

SEQ ID NO: 146459 - protein, 8 aa, Homo Sapiens
NADSATRL

SEQ ID NO: 146460 - protein, 8 aa, Homo Sapiens
NADSGVHL

SEQ ID NO: 146461 - protein, 8 aa, Homo Sapiens
NADVHASL

SEQ ID NO: 146462 - protein, 8 aa, Homo Sapiens
NADWPAGL

SEQ ID NO: 146463 - protein, 8 aa, Homo Sapiens
NIDDVVRF

SEQ ID NO: 146464 - protein, 8 aa, Homo Sapiens
NQDKPALL

SEQ ID NO: 146465 - protein, 8 aa, Homo Sapiens
NQDRPSLL

SEQ ID NO: 146466 - protein, 8 aa, Homo Sapiens
NSDRPGVL

SEQ ID NO: 146467 - protein, 8 aa, Homo Sapiens
NTDEMVEL

SEQ ID NO: 146468 - protein, 8 aa, Homo Sapiens
QADCAVLI

SEQ ID NO: 146469 - protein, 8 aa, Homo Sapiens
QADEPTTL

SEQ ID NO: 146470 - protein, 8 aa, Homo Sapiens
RGDDPVRI

SEQ ID NO: 146471 - protein, 8 aa, Homo Sapiens
RIDMETEL

SEQ ID NO: 146472 - protein, 8 aa, Homo Sapiens
RLDVDTKL

SEQ ID NO: 146473 - protein, 8 aa, Homo Sapiens
RQDSAVNL

SEQ ID NO: 146474 - protein, 8 aa, Homo Sapiens
RSDSYVEL

SEQ ID NO: 146475 - protein, 8 aa, Homo Sapiens
RVDSPVTV

SEQ ID NO: 146476 - protein, 8 aa, Homo Sapiens
SADASIKI

SEQ ID NO: 146477 - protein, 8 aa, Homo Sapiens
SADDVIKM

SEQ ID NO: 146478 - protein, 8 aa, Homo Sapiens
SADEANVL

SEQ ID NO: 146479 - protein, 8 aa, Homo Sapiens
SADEVMRF

SEQ ID NO: 146480 - protein, 8 aa, Homo Sapiens
SADEVQRF

SEQ ID NO: 146481 - protein, 8 aa, Homo Sapiens
SADFHVDL

SEQ ID NO: 146482 - protein, 8 aa, Homo Sapiens
SADFKTEL

SEQ ID NO: 146483 - protein, 8 aa, Homo Sapiens
SADGHSIL

SEQ ID NO: 146484 - protein, 8 aa, Homo Sapiens
SADGHTML

SEQ ID NO: 146485 - protein, 8 aa, Homo Sapiens
SADGIVRI

SEQ ID NO: 146486 - protein, 8 aa, Homo Sapiens
SADGPLKL

SEQ ID NO: 146487 - protein, 8 aa, Homo Sapiens
SADGQTLF

SEQ ID NO: 146488 - protein, 8 aa, Homo Sapiens
SADHCVQL

SEQ ID NO: 146489 - protein, 8 aa, Homo Sapiens
SADHPPKL

SEQ ID NO: 146490 - protein, 8 aa, Homo Sapiens
SADKFQVL

SEQ ID NO: 146491 - protein, 8 aa, Homo Sapiens
SADKPASL

SEQ ID NO: 146492 - protein, 8 aa, Homo Sapiens
SADKSVII

SEQ ID NO: 146493 - protein, 8 aa, Homo Sapiens
SADKTVKL

SEQ ID NO: 146494 - protein, 8 aa, Homo Sapiens
SADKYVKI

SEQ ID NO: 146495 - protein, 8 aa, Homo Sapiens
SADLVAQL

SEQ ID NO: 146496 - protein, 8 aa, Homo Sapiens
SADMTIKL

SEQ ID NO: 146497 - protein, 8 aa, Homo Sapiens
SADNIAHL

SEQ ID NO: 146498 - protein, 8 aa, Homo Sapiens
SADRFVTL

SEQ ID NO: 146499 - protein, 8 aa, Homo Sapiens
SGDDISKL

SEQ ID NO: 146500 - protein, 8 aa, Homo Sapiens
SGDEMVSL

SEQ ID NO: 146501 - protein, 8 aa, Homo Sapiens
SGDVSGKL

SEQ ID NO: 146502 - protein, 8 aa, Homo Sapiens
SIDKAVQL

SEQ ID NO: 146503 - protein, 8 aa, Homo Sapiens
SIVHRKCF

SEQ ID NO: 146504 - protein, 8 aa, Homo Sapiens
SLDAPVKL

SEQ ID NO: 146505 - protein, 8 aa, Homo Sapiens
SLDEVVLL

SEQ ID NO: 146506 - protein, 8 aa, Homo Sapiens
SLDGIVRL

SEQ ID NO: 146507 - protein, 8 aa, Homo Sapiens
SLDSPVLL

SEQ ID NO: 146508 - protein, 8 aa, Homo Sapiens
SLDSPVSV

SEQ ID NO: 146509 - protein, 8 aa, Homo Sapiens
SLDSPVTV

SEQ ID NO: 146510 - protein, 8 aa, Homo Sapiens
SNDDAVRV

SEQ ID NO: 146511 - protein, 8 aa, Homo Sapiens
SSDEAVIL

SEQ ID NO: 146512 - protein, 8 aa, Homo Sapiens
SSDGTVKI

SEQ ID NO: 146513 - protein, 8 aa, Homo Sapiens
SSDLPQVL

SEQ ID NO: 146514 - protein, 8 aa, Homo Sapiens
SSDLPVAL

SEQ ID NO: 146515 - protein, 8 aa, Homo Sapiens
SSDQPLTV

SEQ ID NO: 146516 - protein, 8 aa, Homo Sapiens
SSDQSVKV

SEQ ID NO: 146517 - protein, 8 aa, Homo Sapiens
SSDRPVSL

SEQ ID NO: 146518 - protein, 8 aa, Homo Sapiens
SSDTTVKV

SEQ ID NO: 146519 - protein, 8 aa, Homo Sapiens
STDDGVQF

SEQ ID NO: 146520 - protein, 8 aa, Homo Sapiens
STDGSVLL

SEQ ID NO: 146521 - protein, 8 aa, Homo Sapiens
STDLDSKL

SEQ ID NO: 146522 - protein, 8 aa, Homo Sapiens
STDRVVLI

SEQ ID NO: 146523 - protein, 8 aa, Homo Sapiens
SVDGPIRL

SEQ ID NO: 146524 - protein, 8 aa, Homo Sapiens
SVDQPLKI

SEQ ID NO: 146525 - protein, 8 aa, Homo Sapiens
TADDELSF

SEQ ID NO: 146526 - protein, 8 aa, Homo Sapiens
TADEIVKL

SEQ ID NO: 146527 - protein, 8 aa, Homo Sapiens
TADGMVHL

SEQ ID NO: 146528 - protein, 8 aa, Homo Sapiens
TADGSALV

SEQ ID NO: 146529 - protein, 8 aa, Homo Sapiens
TADISSHF

SEQ ID NO: 146530 - protein, 8 aa, Homo Sapiens
TADKAVDL

SEQ ID NO: 146531 - protein, 8 aa, Homo Sapiens
TADKYAAL

SEQ ID NO: 146532 - protein, 8 aa, Homo Sapiens
TADLPNEL

SEQ ID NO: 146533 - protein, 8 aa, Homo Sapiens
TADQPRWV

SEQ ID NO: 146534 - protein, 8 aa, Homo Sapiens
TADVNSGF

SEQ ID NO: 146535 - protein, 8 aa, Homo Sapiens
TADYICKV

SEQ ID NO: 146536 - protein, 8 aa, Homo Sapiens
TIDEIQKL

SEQ ID NO: 146537 - protein, 8 aa, Homo Sapiens
TIDFPEFL

SEQ ID NO: 146538 - protein, 8 aa, Homo Sapiens
TIDGPSKV

SEQ ID NO: 146539 - protein, 8 aa, Homo Sapiens
TIDGVVFV

SEQ ID NO: 146540 - protein, 8 aa, Homo Sapiens
TIDKNTKI

SEQ ID NO: 146541 - protein, 8 aa, Homo Sapiens
TIDPSHPM

SEQ ID NO: 146542 - protein, 8 aa, Homo Sapiens
TIDTDTLL

SEQ ID NO: 146543 - protein, 8 aa, Homo Sapiens
TLDKPSVV

SEQ ID NO: 146544 - protein, 8 aa, Homo Sapiens
TLDSPAHL

SEQ ID NO: 146545 - protein, 8 aa, Homo Sapiens
TQDGVSRL

SEQ ID NO: 146546 - protein, 8 aa, Homo Sapiens
TSDQPILL

SEQ ID NO: 146547 - protein, 8 aa, Homo Sapiens
TSDWPTVL

SEQ ID NO: 146548 - protein, 8 aa, Homo Sapiens
TTDIQVKV

SEQ ID NO: 146549 - protein, 8 aa, Homo Sapiens
TTDPNSTF

SEQ ID NO: 146550 - protein, 8 aa, Homo Sapiens
VADAGAFL

SEQ ID NO: 146551 - protein, 8 aa, Homo Sapiens
VADDPIVM

SEQ ID NO: 146552 - protein, 8 aa, Homo Sapiens
VADEALKV

SEQ ID NO: 146553 - protein, 8 aa, Homo Sapiens
VADEPERI

SEQ ID NO: 146554 - protein, 8 aa, Homo Sapiens
VADFADKL

SEQ ID NO: 146555 - protein, 8 aa, Homo Sapiens
VADHIQKV

SEQ ID NO: 146556 - protein, 8 aa, Homo Sapiens
VADHRVKL

SEQ ID NO: 146557 - protein, 8 aa, Homo Sapiens
VADKDTVL

SEQ ID NO: 146558 - protein, 8 aa, Homo Sapiens
VADKFTEL

SEQ ID NO: 146559 - protein, 8 aa, Homo Sapiens
VADKHELL

SEQ ID NO: 146560 - protein, 8 aa, Homo Sapiens
VADKIQLI

SEQ ID NO: 146561 - protein, 8 aa, Homo Sapiens
VADLAESI

SEQ ID NO: 146562 - protein, 8 aa, Homo Sapiens
VADLAHVL

SEQ ID NO: 146563 - protein, 8 aa, Homo Sapiens
VADLQTRL

SEQ ID NO: 146564 - protein, 8 aa, Homo Sapiens
VADPVVTF

SEQ ID NO: 146565 - protein, 8 aa, Homo Sapiens
VADRFSEL

SEQ ID NO: 146566 - protein, 8 aa, Homo Sapiens
VADSGLTL

SEQ ID NO: 146567 - protein, 8 aa, Homo Sapiens
VADSKTLL

SEQ ID NO: 146568 - protein, 8 aa, Homo Sapiens
VADTPENL

SEQ ID NO: 146569 - protein, 8 aa, Homo Sapiens
VADVVIKF

SEQ ID NO: 146570 - protein, 8 aa, Homo Sapiens
VAEINGTM

SEQ ID NO: 146571 - protein, 8 aa, Homo Sapiens
VFDPHGTL

SEQ ID NO: 146572 - protein, 8 aa, Homo Sapiens
VGDEASEL

SEQ ID NO: 146573 - protein, 8 aa, Homo Sapiens
VGDGPVDM

SEQ ID NO: 146574 - protein, 8 aa, Homo Sapiens
VIDACIKL

SEQ ID NO: 146575 - protein, 8 aa, Homo Sapiens
VIDEPVRL

SEQ ID NO: 146576 - protein, 8 aa, Homo Sapiens
VIDICMKL

SEQ ID NO: 146577 - protein, 8 aa, Homo Sapiens
VIDKRSPL

SEQ ID NO: 146578 - protein, 8 aa, Homo Sapiens
VIDNGSGM

SEQ ID NO: 146579 - protein, 8 aa, Homo Sapiens
VIDSPGIL

SEQ ID NO: 146580 - protein, 8 aa, Homo Sapiens
VIDTQQKV

SEQ ID NO: 146581 - protein, 8 aa, Homo Sapiens
VIDYAVKI

SEQ ID NO: 146582 - protein, 8 aa, Homo Sapiens
VLDHFSEL

SEQ ID NO: 146583 - protein, 8 aa, Homo Sapiens
VLDIEQRL

SEQ ID NO: 146584 - protein, 8 aa, Homo Sapiens
VLDKPSRL

SEQ ID NO: 146585 - protein, 8 aa, Homo Sapiens
VNDGVVRL

SEQ ID NO: 146586 - protein, 8 aa, Homo Sapiens
VSDAPVHI

SEQ ID NO: 146587 - protein, 8 aa, Homo Sapiens
VSDDPQVL

SEQ ID NO: 146588 - protein, 8 aa, Homo Sapiens
VSDDTVEM

SEQ ID NO: 146589 - protein, 8 aa, Homo Sapiens
VSDEHSLF

SEQ ID NO: 146590 - protein, 8 aa, Homo Sapiens
VSDGETKF

SEQ ID NO: 146591 - protein, 8 aa, Homo Sapiens
VSDGVIKV

SEQ ID NO: 146592 - protein, 8 aa, Homo Sapiens
VSDHEATL

SEQ ID NO: 146593 - protein, 8 aa, Homo Sapiens
VSDKAVSL

SEQ ID NO: 146594 - protein, 8 aa, Homo Sapiens
VSDKDASL

SEQ ID NO: 146595 - protein, 8 aa, Homo Sapiens
VSDKDTGL

SEQ ID NO: 146596 - protein, 8 aa, Homo Sapiens
VSDNQVHL

SEQ ID NO: 146597 - protein, 8 aa, Homo Sapiens
VSDYEMKL

SEQ ID NO: 146598 - protein, 8 aa, Homo Sapiens
VTDAESKL

SEQ ID NO: 146599 - protein, 8 aa, Homo Sapiens
VTDDGMAV

SEQ ID NO: 146600 - protein, 8 aa, Homo Sapiens
VTDDLVCL

SEQ ID NO: 146601 - protein, 8 aa, Homo Sapiens
VTDDPTQV

SEQ ID NO: 146602 - protein, 8 aa, Homo Sapiens
VTDEPVYI

SEQ ID NO: 146603 - protein, 8 aa, Homo Sapiens
VTDFISHL

SEQ ID NO: 146604 - protein, 8 aa, Homo Sapiens
VTDSGPTF

SEQ ID NO: 146605 - protein, 8 aa, Homo Sapiens
VVDDAAVL

SEQ ID NO: 146606 - protein, 8 aa, Homo Sapiens
VVDEAVLV

SEQ ID NO: 146607 - protein, 8 aa, Homo Sapiens
VVDHQTEL

SEQ ID NO: 146608 - protein, 8 aa, Homo Sapiens
VVDIESRL

SEQ ID NO: 146609 - protein, 8 aa, Homo Sapiens
VVDIVQEL

SEQ ID NO: 146610 - protein, 8 aa, Homo Sapiens
VVDKAMEL

SEQ ID NO: 146611 - protein, 8 aa, Homo Sapiens
VVDNPIYL

SEQ ID NO: 146612 - protein, 8 aa, Homo Sapiens
VVDNPQKF

SEQ ID NO: 146613 - protein, 8 aa, Homo Sapiens
VVDQEQHL

SEQ ID NO: 146614 - protein, 8 aa, Homo Sapiens
VVDQPLKL

SEQ ID NO: 146615 - protein, 8 aa, Homo Sapiens
VVDVDVKL

SEQ ID NO: 146616 - protein, 8 aa, Homo Sapiens
VVDVSSHL

SEQ ID NO: 146617 - protein, 8 aa, Homo Sapiens
YADGESFL

SEQ ID NO: 146618 - protein, 8 aa, Homo Sapiens
YADRHAEL

SEQ ID NO: 146619 - protein, 8 aa, Homo Sapiens
YADTVTTV

SEQ ID NO: 146620 - protein, 8 aa, Homo Sapiens
YADVQAVL

SEQ ID NO: 146621 - protein, 8 aa, Homo Sapiens
YEDIAQKS

SEQ ID NO: 146622 - protein, 8 aa, Homo Sapiens
YFDEPVEL

SEQ ID NO: 146623 - protein, 8 aa, Homo Sapiens
YGDSAAKI

SEQ ID NO: 146624 - protein, 8 aa, Homo Sapiens
YIDKSTQL

SEQ ID NO: 146625 - protein, 8 aa, Homo Sapiens
YIDKTIRV

SEQ ID NO: 146626 - protein, 8 aa, Homo Sapiens
YLDKISEL

SEQ ID NO: 146627 - protein, 8 aa, Homo Sapiens
YLDSEQRL

SEQ ID NO: 146628 - protein, 8 aa, Homo Sapiens
YSDGEISI

SEQ ID NO: 146629 - protein, 8 aa, Homo Sapiens
YSDIVTTL

SEQ ID NO: 146630 - protein, 8 aa, Homo Sapiens
YSDRISEL

SEQ ID NO: 146631 - protein, 8 aa, Homo Sapiens
YSDSTAKL

SEQ ID NO: 146632 - protein, 8 aa, Homo Sapiens
YTDEAVVI

SEQ ID NO: 146633 - protein, 8 aa, Homo Sapiens
YTDELVEL

SEQ ID NO: 146634 - protein, 8 aa, Homo Sapiens
YTDLEVRV

SEQ ID NO: 146635 - protein, 8 aa, Homo Sapiens
YTDNLVRV

SEQ ID NO: 146636 - protein, 8 aa, Homo Sapiens
YVDDSIAL

SEQ ID NO: 146637 - protein, 8 aa, Homo Sapiens
YVDDTQFV

SEQ ID NO: 146638 - protein, 8 aa, Homo Sapiens
YVDFPQHL

SEQ ID NO: 146639 - protein, 9 aa, Homo Sapiens
AACGGHVEL

SEQ ID NO: 146640 - protein, 9 aa, Homo Sapiens
AADAEPLEI

SEQ ID NO: 146641 - protein, 9 aa, Homo Sapiens
AADAGFALF

SEQ ID NO: 146642 - protein, 9 aa, Homo Sapiens
AADAKPESL

SEQ ID NO: 146643 - protein, 9 aa, Homo Sapiens
AADDHTVKL

SEQ ID NO: 146644 - protein, 9 aa, Homo Sapiens
AADDIHRSL

SEQ ID NO: 146645 - protein, 9 aa, Homo Sapiens
AADDKEACF

SEQ ID NO: 146646 - protein, 9 aa, Homo Sapiens
AADDRLRIS

SEQ ID NO: 146647 - protein, 9 aa, Homo Sapiens
AADDRTVRI

SEQ ID NO: 146648 - protein, 9 aa, Homo Sapiens
AADDSKLVL

SEQ ID NO: 146649 - protein, 9 aa, Homo Sapiens
AADDSSVKL

SEQ ID NO: 146650 - protein, 9 aa, Homo Sapiens
AADDTEISF

SEQ ID NO: 146651 - protein, 9 aa, Homo Sapiens
AADEITHCI

SEQ ID NO: 146652 - protein, 9 aa, Homo Sapiens
AADEKSVSI

SEQ ID NO: 146653 - protein, 9 aa, Homo Sapiens
AADEPVTVL

SEQ ID NO: 146654 - protein, 9 aa, Homo Sapiens
AADEVLAVL

SEQ ID NO: 146655 - protein, 9 aa, Homo Sapiens
AADEVTAHL

SEQ ID NO: 146656 - protein, 9 aa, Homo Sapiens
AADFAQMEL

SEQ ID NO: 146657 - protein, 9 aa, Homo Sapiens
AADFEIGHF

SEQ ID NO: 146658 - protein, 9 aa, Homo Sapiens
AADGGPKLV

SEQ ID NO: 146659 - protein, 9 aa, Homo Sapiens
AADGKGVVV

SEQ ID NO: 146660 - protein, 9 aa, Homo Sapiens
AADGKLLKL

SEQ ID NO: 146661 - protein, 9 aa, Homo Sapiens
AADGPQKLL

SEQ ID NO: 146662 - protein, 9 aa, Homo Sapiens
AADGSVKLW

SEQ ID NO: 146663 - protein, 9 aa, Homo Sapiens
AADGVLSEV

SEQ ID NO: 146664 - protein, 9 aa, Homo Sapiens
AADHTGPKF

SEQ ID NO: 146665 - protein, 9 aa, Homo Sapiens
AADHTVYKL

SEQ ID NO: 146666 - protein, 9 aa, Homo Sapiens
AADIENRVL

SEQ ID NO: 146667 - protein, 9 aa, Homo Sapiens
AADKAIEKM

SEQ ID NO: 146668 - protein, 9 aa, Homo Sapiens
AADKGHYKF

SEQ ID NO: 146669 - protein, 9 aa, Homo Sapiens
AADKIHSSF

SEQ ID NO: 146670 - protein, 9 aa, Homo Sapiens
AADKRLTVL

SEQ ID NO: 146671 - protein, 9 aa, Homo Sapiens
AADKRPPKF

SEQ ID NO: 146672 - protein, 9 aa, Homo Sapiens
AADLGSPSL

SEQ ID NO: 146673 - protein, 9 aa, Homo Sapiens
AADLPARGF

SEQ ID NO: 146674 - protein, 9 aa, Homo Sapiens
AADLSLHSF

SEQ ID NO: 146675 - protein, 9 aa, Homo Sapiens
AADPEAPEI

SEQ ID NO: 146676 - protein, 9 aa, Homo Sapiens
AADPIITRW

SEQ ID NO: 146677 - protein, 9 aa, Homo Sapiens
AADPLASKL

SEQ ID NO: 146678 - protein, 9 aa, Homo Sapiens
AADPSVVNL

SEQ ID NO: 146679 - protein, 9 aa, Homo Sapiens
AADPVSPLL

SEQ ID NO: 146680 - protein, 9 aa, Homo Sapiens
AADQAKQLL

SEQ ID NO: 146681 - protein, 9 aa, Homo Sapiens
AADRCGAAL

SEQ ID NO: 146682 - protein, 9 aa, Homo Sapiens
AADRPGVSL

SEQ ID NO: 146683 - protein, 9 aa, Homo Sapiens
AADSAVRLW

SEQ ID NO: 146684 - protein, 9 aa, Homo Sapiens
AADSPGSGL

SEQ ID NO: 146685 - protein, 9 aa, Homo Sapiens
AADSPSQNL

SEQ ID NO: 146686 - protein, 9 aa, Homo Sapiens
AADTLVTKF

SEQ ID NO: 146687 - protein, 9 aa, Homo Sapiens
AAEAAAAVV

SEQ ID NO: 146688 - protein, 9 aa, Homo Sapiens
AAEAAEVIL

SEQ ID NO: 146689 - protein, 9 aa, Homo Sapiens
AAEATPVAL

SEQ ID NO: 146690 - protein, 9 aa, Homo Sapiens
AAEDKSWRV

SEQ ID NO: 146691 - protein, 9 aa, Homo Sapiens
AAEEANAVL

SEQ ID NO: 146692 - protein, 9 aa, Homo Sapiens
AAEEPLSLL

SEQ ID NO: 146693 - protein, 9 aa, Homo Sapiens
AAEEPNAAV

SEQ ID NO: 146694 - protein, 9 aa, Homo Sapiens
AAEEPVSEV

SEQ ID NO: 146695 - protein, 9 aa, Homo Sapiens
AAEEREASL

SEQ ID NO: 146696 - protein, 9 aa, Homo Sapiens
AAEFVPSFL

SEQ ID NO: 146697 - protein, 9 aa, Homo Sapiens
AAEKGDVGL

SEQ ID NO: 146698 - protein, 9 aa, Homo Sapiens
AAEKKVVKI

SEQ ID NO: 146699 - protein, 9 aa, Homo Sapiens
AAEKSITIL

SEQ ID NO: 146700 - protein, 9 aa, Homo Sapiens
AAEPHVVTV

SEQ ID NO: 146701 - protein, 9 aa, Homo Sapiens
AAEPTPTQV

SEQ ID NO: 146702 - protein, 9 aa, Homo Sapiens
AAEQKVTRL

SEQ ID NO: 146703 - protein, 9 aa, Homo Sapiens
AAEVAATEI

SEQ ID NO: 146704 - protein, 9 aa, Homo Sapiens
AAEYPAVKF

SEQ ID NO: 146705 - protein, 9 aa, Homo Sapiens
AAISQVDRL

SEQ ID NO: 146706 - protein, 9 aa, Homo Sapiens
AAPAYSRAL

SEQ ID NO: 146707 - protein, 9 aa, Homo Sapiens
AGDDAPRAV

SEQ ID NO: 146708 - protein, 9 aa, Homo Sapiens
AGDEGRVLL

SEQ ID NO: 146709 - protein, 9 aa, Homo Sapiens
AGDGEVTKI

SEQ ID NO: 146710 - protein, 9 aa, Homo Sapiens
AGDGGRVAL

SEQ ID NO: 146711 - protein, 9 aa, Homo Sapiens
AGDGPPRSF

SEQ ID NO: 146712 - protein, 9 aa, Homo Sapiens
AGDKPRTFL

SEQ ID NO: 146713 - protein, 9 aa, Homo Sapiens
AGDSPGSQF

SEQ ID NO: 146714 - protein, 9 aa, Homo Sapiens
AGDTTNFHF

SEQ ID NO: 146715 - protein, 9 aa, Homo Sapiens
AGDWRPSSI

SEQ ID NO: 146716 - protein, 9 aa, Homo Sapiens
AIDRAGAEV

SEQ ID NO: 146717 - protein, 9 aa, Homo Sapiens
AIDSPVSFL

SEQ ID NO: 146718 - protein, 9 aa, Homo Sapiens
AKDEPDTNL

SEQ ID NO: 146719 - protein, 9 aa, Homo Sapiens
AKEIDVSFV

SEQ ID NO: 146720 - protein, 9 aa, Homo Sapiens
ALDEAAAAL

SEQ ID NO: 146721 - protein, 9 aa, Homo Sapiens
ALDEPTTNL

SEQ ID NO: 146722 - protein, 9 aa, Homo Sapiens
ALDGDAVVL

SEQ ID NO: 146723 - protein, 9 aa, Homo Sapiens
ALDKATVLL

SEQ ID NO: 146724 - protein, 9 aa, Homo Sapiens
ALDSGVSTM

SEQ ID NO: 146725 - protein, 9 aa, Homo Sapiens
ALDVPHAEL

SEQ ID NO: 146726 - protein, 9 aa, Homo Sapiens
ALDVPNTML

SEQ ID NO: 146727 - protein, 9 aa, Homo Sapiens
AMDLVKNHL

SEQ ID NO: 146728 - protein, 9 aa, Homo Sapiens
ANDDPNGIF

SEQ ID NO: 146729 - protein, 9 aa, Homo Sapiens
AQDDPDSCL

SEQ ID NO: 146730 - protein, 9 aa, Homo Sapiens
AQDEHLITF

SEQ ID NO: 146731 - protein, 9 aa, Homo Sapiens
AQDLGVVNL

SEQ ID NO: 146732 - protein, 9 aa, Homo Sapiens
AQDPEIASL

SEQ ID NO: 146733 - protein, 9 aa, Homo Sapiens
AQDPVPSKL

SEQ ID NO: 146734 - protein, 9 aa, Homo Sapiens
ASDDGTVRI

SEQ ID NO: 146735 - protein, 9 aa, Homo Sapiens
ASDDGYIKI

SEQ ID NO: 146736 - protein, 9 aa, Homo Sapiens
ASDDHTVCL

SEQ ID NO: 146737 - protein, 9 aa, Homo Sapiens
ASDDKTVKL

SEQ ID NO: 146738 - protein, 9 aa, Homo Sapiens
ASDEGRVQM

SEQ ID NO: 146739 - protein, 9 aa, Homo Sapiens
ASDHAPHTL

SEQ ID NO: 146740 - protein, 9 aa, Homo Sapiens
ASDIAMTEL

SEQ ID NO: 146741 - protein, 9 aa, Homo Sapiens
ASDIPGLHL

SEQ ID NO: 146742 - protein, 9 aa, Homo Sapiens
ASDKETYEL

SEQ ID NO: 146743 - protein, 9 aa, Homo Sapiens
ASDPDEAKL

SEQ ID NO: 146744 - protein, 9 aa, Homo Sapiens
ASDPRIIRL

SEQ ID NO: 146745 - protein, 9 aa, Homo Sapiens
ASDPYQVHV

SEQ ID NO: 146746 - protein, 9 aa, Homo Sapiens
ASDQPSHSL

SEQ ID NO: 146747 - protein, 9 aa, Homo Sapiens
ASEDATIKV

SEQ ID NO: 146748 - protein, 9 aa, Homo Sapiens
ASEGKTVEV

SEQ ID NO: 146749 - protein, 9 aa, Homo Sapiens
ATDPRPCEV

SEQ ID NO: 146750 - protein, 9 aa, Homo Sapiens
AVDAVIAEL

SEQ ID NO: 146751 - protein, 9 aa, Homo Sapiens
AVDDGVNTF

SEQ ID NO: 146752 - protein, 9 aa, Homo Sapiens
AVDGNTVEL

SEQ ID NO: 146753 - protein, 9 aa, Homo Sapiens
AVDGRTVNL

SEQ ID NO: 146754 - protein, 9 aa, Homo Sapiens
AVDGSGTKF

SEQ ID NO: 146755 - protein, 9 aa, Homo Sapiens
AVDKTGRIL

SEQ ID NO: 146756 - protein, 9 aa, Homo Sapiens
AVDLGGTNL

SEQ ID NO: 146757 - protein, 9 aa, Homo Sapiens
AVDPNGAFL

SEQ ID NO: 146758 - protein, 9 aa, Homo Sapiens
AVDPQPSVV

SEQ ID NO: 146759 - protein, 9 aa, Homo Sapiens
AVDRAITHL

SEQ ID NO: 146760 - protein, 9 aa, Homo Sapiens
CAPRRKVAL

SEQ ID NO: 146761 - protein, 9 aa, Homo Sapiens
CSDEVTRQL

SEQ ID NO: 146762 - protein, 9 aa, Homo Sapiens
EIKDKTAEL

SEQ ID NO: 146763 - protein, 9 aa, Homo Sapiens
EKAQGPILL

SEQ ID NO: 146764 - protein, 9 aa, Homo Sapiens
EPSELPLPG

SEQ ID NO: 146765 - protein, 9 aa, Homo Sapiens
ESSPPGTTF

SEQ ID NO: 146766 - protein, 9 aa, Homo Sapiens
ETDPGMVHL

SEQ ID NO: 146767 - protein, 9 aa, Homo Sapiens
FADAVQELL

SEQ ID NO: 146768 - protein, 9 aa, Homo Sapiens
FADDPCSSV

SEQ ID NO: 146769 - protein, 9 aa, Homo Sapiens
FADENNEKL

SEQ ID NO: 146770 - protein, 9 aa, Homo Sapiens
FADGHVLEL

SEQ ID NO: 146771 - protein, 9 aa, Homo Sapiens
FADHVSSSL

SEQ ID NO: 146772 - protein, 9 aa, Homo Sapiens
FADKHIQVL

SEQ ID NO: 146773 - protein, 9 aa, Homo Sapiens
FADNDVSRF

SEQ ID NO: 146774 - protein, 9 aa, Homo Sapiens
FADQAEILL

SEQ ID NO: 146775 - protein, 9 aa, Homo Sapiens
FADQENQVA

SEQ ID NO: 146776 - protein, 9 aa, Homo Sapiens
FADQEVRSL

SEQ ID NO: 146777 - protein, 9 aa, Homo Sapiens
FADQVEEIL

SEQ ID NO: 146778 - protein, 9 aa, Homo Sapiens
FADREVQLL

SEQ ID NO: 146779 - protein, 9 aa, Homo Sapiens
FADVAPLQL

SEQ ID NO: 146780 - protein, 9 aa, Homo Sapiens
FADVEGKNL

SEQ ID NO: 146781 - protein, 9 aa, Homo Sapiens
FADYPCHTV

SEQ ID NO: 146782 - protein, 9 aa, Homo Sapiens
FAEAGRSTL

SEQ ID NO: 146783 - protein, 9 aa, Homo Sapiens
FAEAVKTVF

SEQ ID NO: 146784 - protein, 9 aa, Homo Sapiens
FAEDPPTSL

SEQ ID NO: 146785 - protein, 9 aa, Homo Sapiens
FAEEVGAAL

SEQ ID NO: 146786 - protein, 9 aa, Homo Sapiens
FAEHRPPKI

SEQ ID NO: 146787 - protein, 9 aa, Homo Sapiens
FAEKLSVKL

SEQ ID NO: 146788 - protein, 9 aa, Homo Sapiens
FAEMYVAKF

SEQ ID NO: 146789 - protein, 9 aa, Homo Sapiens
FAEPSSVSF

SEQ ID NO: 146790 - protein, 9 aa, Homo Sapiens
FAERSVAKL

SEQ ID NO: 146791 - protein, 9 aa, Homo Sapiens
FAERTVAKL

SEQ ID NO: 146792 - protein, 9 aa, Homo Sapiens
FAETHRTVL

SEQ ID NO: 146793 - protein, 9 aa, Homo Sapiens
FAIDPHLLL

SEQ ID NO: 146794 - protein, 9 aa, Homo Sapiens
FAIPLIEKL

SEQ ID NO: 146795 - protein, 9 aa, Homo Sapiens
FGDDIPSAL

SEQ ID NO: 146796 - protein, 9 aa, Homo Sapiens
FGDTGGFHF

SEQ ID NO: 146797 - protein, 9 aa, Homo Sapiens
FIDDANYSV

SEQ ID NO: 146798 - protein, 9 aa, Homo Sapiens
FIDEAGHCM

SEQ ID NO: 146799 - protein, 9 aa, Homo Sapiens
FIDGHFVEM

SEQ ID NO: 146800 - protein, 9 aa, Homo Sapiens
FIDKPVCFV

SEQ ID NO: 146801 - protein, 9 aa, Homo Sapiens
FIEEHATKL

SEQ ID NO: 146802 - protein, 9 aa, Homo Sapiens
FIEESRQLL

SEQ ID NO: 146803 - protein, 9 aa, Homo Sapiens
FIESAHTEL

SEQ ID NO: 146804 - protein, 9 aa, Homo Sapiens
FLDASGAKL

SEQ ID NO: 146805 - protein, 9 aa, Homo Sapiens
FLDEKTHEL

SEQ ID NO: 146806 - protein, 9 aa, Homo Sapiens
FLDENVHFF

SEQ ID NO: 146807 - protein, 9 aa, Homo Sapiens
FLDEPTNHL

SEQ ID NO: 146808 - protein, 9 aa, Homo Sapiens
FLDNGPKTI

SEQ ID NO: 146809 - protein, 9 aa, Homo Sapiens
FLDQHGHNL

SEQ ID NO: 146810 - protein, 9 aa, Homo Sapiens
FLDSEVSEL

SEQ ID NO: 146811 - protein, 9 aa, Homo Sapiens
FLDSTSPLL

SEQ ID NO: 146812 - protein, 9 aa, Homo Sapiens
FLEDHGLLV

SEQ ID NO: 146813 - protein, 9 aa, Homo Sapiens
FLEDSNVKL

SEQ ID NO: 146814 - protein, 9 aa, Homo Sapiens
FLEEHGPAM

SEQ ID NO: 146815 - protein, 9 aa, Homo Sapiens
FLEKESAIV

SEQ ID NO: 146816 - protein, 9 aa, Homo Sapiens
FQDDDQTRV

SEQ ID NO: 146817 - protein, 9 aa, Homo Sapiens
FQDFNPSKF

SEQ ID NO: 146818 - protein, 9 aa, Homo Sapiens
FQDGPKSYL

SEQ ID NO: 146819 - protein, 9 aa, Homo Sapiens
FQDKQVSRV

SEQ ID NO: 146820 - protein, 9 aa, Homo Sapiens
FQDPVPLTV

SEQ ID NO: 146821 - protein, 9 aa, Homo Sapiens
FQDSGLSRF

SEQ ID NO: 146822 - protein, 9 aa, Homo Sapiens
FQEADSPTL

SEQ ID NO: 146823 - protein, 9 aa, Homo Sapiens
FSDDSDLQL

SEQ ID NO: 146824 - protein, 9 aa, Homo Sapiens
FSDEIRHNL

SEQ ID NO: 146825 - protein, 9 aa, Homo Sapiens
FSDENVPRL

SEQ ID NO: 146826 - protein, 9 aa, Homo Sapiens
FSDKQMIKL

SEQ ID NO: 146827 - protein, 9 aa, Homo Sapiens
FSDLTMHEL

SEQ ID NO: 146828 - protein, 9 aa, Homo Sapiens
FSDSSGLTV

SEQ ID NO: 146829 - protein, 9 aa, Homo Sapiens
FSDSVKSTF

SEQ ID NO: 146830 - protein, 9 aa, Homo Sapiens
FSDTGNFGF

SEQ ID NO: 146831 - protein, 9 aa, Homo Sapiens
FSDTLKTYF

SEQ ID NO: 146832 - protein, 9 aa, Homo Sapiens
FSEEHPVLL

SEQ ID NO: 146833 - protein, 9 aa, Homo Sapiens
FSEETPVVL

SEQ ID NO: 146834 - protein, 9 aa, Homo Sapiens
FTDEESRVF

SEQ ID NO: 146835 - protein, 9 aa, Homo Sapiens
FTDGGPRTL

SEQ ID NO: 146836 - protein, 9 aa, Homo Sapiens
FTDGITNKL

SEQ ID NO: 146837 - protein, 9 aa, Homo Sapiens
FTDIGKVDF

SEQ ID NO: 146838 - protein, 9 aa, Homo Sapiens
FTEDHYVEF

SEQ ID NO: 146839 - protein, 9 aa, Homo Sapiens
FVDCPGHDI

SEQ ID NO: 146840 - protein, 9 aa, Homo Sapiens
FVDDQQTFF

SEQ ID NO: 146841 - protein, 9 aa, Homo Sapiens
FVDDYTVRV

SEQ ID NO: 146842 - protein, 9 aa, Homo Sapiens
FVDEGKATV

SEQ ID NO: 146843 - protein, 9 aa, Homo Sapiens
FVDGSAIQV

SEQ ID NO: 146844 - protein, 9 aa, Homo Sapiens
FVDLEPTVI

SEQ ID NO: 146845 - protein, 9 aa, Homo Sapiens
FVDPAQITM

SEQ ID NO: 146846 - protein, 9 aa, Homo Sapiens
FVDVQPSSL

SEQ ID NO: 146847 - protein, 9 aa, Homo Sapiens
FVEEEEHFL

SEQ ID NO: 146848 - protein, 9 aa, Homo Sapiens
FVEGRSVEF

SEQ ID NO: 146849 - protein, 9 aa, Homo Sapiens
FVEPSRQFV

SEQ ID NO: 146850 - protein, 9 aa, Homo Sapiens
GADDRLVKI

SEQ ID NO: 146851 - protein, 9 aa, Homo Sapiens
GADEAPPRL

SEQ ID NO: 146852 - protein, 9 aa, Homo Sapiens
GADEKVLRV

SEQ ID NO: 146853 - protein, 9 aa, Homo Sapiens
GADFLVTEV

SEQ ID NO: 146854 - protein, 9 aa, Homo Sapiens
GADIHSKEF

SEQ ID NO: 146855 - protein, 9 aa, Homo Sapiens
GADKNVVVF

SEQ ID NO: 146856 - protein, 9 aa, Homo Sapiens
GADLPNLLF

SEQ ID NO: 146857 - protein, 9 aa, Homo Sapiens
GADLPSNHV

SEQ ID NO: 146858 - protein, 9 aa, Homo Sapiens
GADNSVVRF

SEQ ID NO: 146859 - protein, 9 aa, Homo Sapiens
GADPNATTL

SEQ ID NO: 146860 - protein, 9 aa, Homo Sapiens
GADPSTVEM

SEQ ID NO: 146861 - protein, 9 aa, Homo Sapiens
GADSKTVKL

SEQ ID NO: 146862 - protein, 9 aa, Homo Sapiens
GDAVSPRQL

SEQ ID NO: 146863 - protein, 9 aa, Homo Sapiens
GIDSPVSEL

SEQ ID NO: 146864 - protein, 9 aa, Homo Sapiens
GIDSSSPEV

SEQ ID NO: 146865 - protein, 9 aa, Homo Sapiens
GSDDGTVKL

SEQ ID NO: 146866 - protein, 9 aa, Homo Sapiens
GSDPRVTQL

SEQ ID NO: 146867 - protein, 9 aa, Homo Sapiens
GSDPTVVSI

SEQ ID NO: 146868 - protein, 9 aa, Homo Sapiens
HADDFIQEM

SEQ ID NO: 146869 - protein, 9 aa, Homo Sapiens
HADDPERVV

SEQ ID NO: 146870 - protein, 9 aa, Homo Sapiens
HADGLCHRL

SEQ ID NO: 146871 - protein, 9 aa, Homo Sapiens
HADHIGQGF

SEQ ID NO: 146872 - protein, 9 aa, Homo Sapiens
HADHSSLTL

SEQ ID NO: 146873 - protein, 9 aa, Homo Sapiens
HADILLINL

SEQ ID NO: 146874 - protein, 9 aa, Homo Sapiens
HADIPETCV

SEQ ID NO: 146875 - protein, 9 aa, Homo Sapiens
HADPEPSVI

SEQ ID NO: 146876 - protein, 9 aa, Homo Sapiens
HADSNIVIM

SEQ ID NO: 146877 - protein, 9 aa, Homo Sapiens
HADVGVALL

SEQ ID NO: 146878 - protein, 9 aa, Homo Sapiens
HAMQFPAEL

SEQ ID NO: 146879 - protein, 9 aa, Homo Sapiens
HIDFGGTSV

SEQ ID NO: 146880 - protein, 9 aa, Homo Sapiens
HIDSGKTAL

SEQ ID NO: 146881 - protein, 9 aa, Homo Sapiens
HIDSGKTTL

SEQ ID NO: 146882 - protein, 9 aa, Homo Sapiens
HIDVITAEM

SEQ ID NO: 146883 - protein, 9 aa, Homo Sapiens
HLDDQMTLL

SEQ ID NO: 146884 - protein, 9 aa, Homo Sapiens
HLDEARTLL

SEQ ID NO: 146885 - protein, 9 aa, Homo Sapiens
HLDPGPIYM

SEQ ID NO: 146886 - protein, 9 aa, Homo Sapiens
HPDAPMSQV

SEQ ID NO: 146887 - protein, 9 aa, Homo Sapiens
HQDFPSVVL

SEQ ID NO: 146888 - protein, 9 aa, Homo Sapiens
HSEESQIYL

SEQ ID NO: 146889 - protein, 9 aa, Homo Sapiens
HTDDSALCM

SEQ ID NO: 146890 - protein, 9 aa, Homo Sapiens
HTDLPVSVF

SEQ ID NO: 146891 - protein, 9 aa, Homo Sapiens
HTDVADVLL

SEQ ID NO: 146892 - protein, 9 aa, Homo Sapiens
HTEEKPFEV

SEQ ID NO: 146893 - protein, 9 aa, Homo Sapiens
HVDGHLYEL

SEQ ID NO: 146894 - protein, 9 aa, Homo Sapiens
HVDGVAVTL

SEQ ID NO: 146895 - protein, 9 aa, Homo Sapiens
HVDTGNSYL

SEQ ID NO: 146896 - protein, 9 aa, Homo Sapiens
HVDTLVTKF

SEQ ID NO: 146897 - protein, 9 aa, Homo Sapiens
IADDADPRV

SEQ ID NO: 146898 - protein, 9 aa, Homo Sapiens
IADENGAYL

SEQ ID NO: 146899 - protein, 9 aa, Homo Sapiens
IADGGFTEL

SEQ ID NO: 146900 - protein, 9 aa, Homo Sapiens
IADGLPVAV

SEQ ID NO: 146901 - protein, 9 aa, Homo Sapiens
IADIHPIQV

SEQ ID NO: 146902 - protein, 9 aa, Homo Sapiens
IADIKRTVL

SEQ ID NO: 146903 - protein, 9 aa, Homo Sapiens
IADKTENTL

SEQ ID NO: 146904 - protein, 9 aa, Homo Sapiens
IADLMEEKF

SEQ ID NO: 146905 - protein, 9 aa, Homo Sapiens
IADLPSTQL

SEQ ID NO: 146906 - protein, 9 aa, Homo Sapiens
IADLVSKEL

SEQ ID NO: 146907 - protein, 9 aa, Homo Sapiens
IADPDQPVL

SEQ ID NO: 146908 - protein, 9 aa, Homo Sapiens
IADPNIAKL

SEQ ID NO: 146909 - protein, 9 aa, Homo Sapiens
IADPRGNTL

SEQ ID NO: 146910 - protein, 9 aa, Homo Sapiens
IADQEEVKV

SEQ ID NO: 146911 - protein, 9 aa, Homo Sapiens
IADRGAEYV

SEQ ID NO: 146912 - protein, 9 aa, Homo Sapiens
IADRLNVEF

SEQ ID NO: 146913 - protein, 9 aa, Homo Sapiens
IADRPPPVI

SEQ ID NO: 146914 - protein, 9 aa, Homo Sapiens
IADSNPMVV

SEQ ID NO: 146915 - protein, 9 aa, Homo Sapiens
IADTGANVV

SEQ ID NO: 146916 - protein, 9 aa, Homo Sapiens
IADVAPSAI

SEQ ID NO: 146917 - protein, 9 aa, Homo Sapiens
IAEAVRTTL

SEQ ID NO: 146918 - protein, 9 aa, Homo Sapiens
IAEDKTVVV

SEQ ID NO: 146919 - protein, 9 aa, Homo Sapiens
IAEDPKVFL

SEQ ID NO: 146920 - protein, 9 aa, Homo Sapiens
IAEEKGLVV

SEQ ID NO: 146921 - protein, 9 aa, Homo Sapiens
IAEETSSRL

SEQ ID NO: 146922 - protein, 9 aa, Homo Sapiens
IAEGGASRF

SEQ ID NO: 146923 - protein, 9 aa, Homo Sapiens
IAEGPETKI

SEQ ID NO: 146924 - protein, 9 aa, Homo Sapiens
IAESKSPEM

SEQ ID NO: 146925 - protein, 9 aa, Homo Sapiens
IGDEAATHL

SEQ ID NO: 146926 - protein, 9 aa, Homo Sapiens
IGDEGVSQL

SEQ ID NO: 146927 - protein, 9 aa, Homo Sapiens
IGDGRSPEF

SEQ ID NO: 146928 - protein, 9 aa, Homo Sapiens
IGDIHPSDL

SEQ ID NO: 146929 - protein, 9 aa, Homo Sapiens
IGDPNLEFV

SEQ ID NO: 146930 - protein, 9 aa, Homo Sapiens
IGDSRPPSF

SEQ ID NO: 146931 - protein, 9 aa, Homo Sapiens
IIDDGDSNL

SEQ ID NO: 146932 - protein, 9 aa, Homo Sapiens
IIDDNHAIV

SEQ ID NO: 146933 - protein, 9 aa, Homo Sapiens
IIDDPNLVV

SEQ ID NO: 146934 - protein, 9 aa, Homo Sapiens
IIDDSDSNL

SEQ ID NO: 146935 - protein, 9 aa, Homo Sapiens
IIDEKGPVM

SEQ ID NO: 146936 - protein, 9 aa, Homo Sapiens
IIDEVVNKF

SEQ ID NO: 146937 - protein, 9 aa, Homo Sapiens
IIDGKIFCV

SEQ ID NO: 146938 - protein, 9 aa, Homo Sapiens
IIDKEVSLM

SEQ ID NO: 146939 - protein, 9 aa, Homo Sapiens
IIDKSGSTI

SEQ ID NO: 146940 - protein, 9 aa, Homo Sapiens
IIDKSGSTV

SEQ ID NO: 146941 - protein, 9 aa, Homo Sapiens
IIDRAITSL

SEQ ID NO: 146942 - protein, 9 aa, Homo Sapiens
IIDRTNTTL

SEQ ID NO: 146943 - protein, 9 aa, Homo Sapiens
IIEADEVLL

SEQ ID NO: 146944 - protein, 9 aa, Homo Sapiens
IIEEHPPMI

SEQ ID NO: 146945 - protein, 9 aa, Homo Sapiens
ILDEPTNHL

SEQ ID NO: 146946 - protein, 9 aa, Homo Sapiens
ILDPHVVLL

SEQ ID NO: 146947 - protein, 9 aa, Homo Sapiens
ILLAIEEPV

SEQ ID NO: 146948 - protein, 9 aa, Homo Sapiens
INDAGEVRL

SEQ ID NO: 146949 - protein, 9 aa, Homo Sapiens
IQDEIRSVI

SEQ ID NO: 146950 - protein, 9 aa, Homo Sapiens
ISDAPVTGM

SEQ ID NO: 146951 - protein, 9 aa, Homo Sapiens
ISDDRLTVV

SEQ ID NO: 146952 - protein, 9 aa, Homo Sapiens
ISDEANSNF

SEQ ID NO: 146953 - protein, 9 aa, Homo Sapiens
ISDEGIAYL

SEQ ID NO: 146954 - protein, 9 aa, Homo Sapiens
ISDLAQHYL

SEQ ID NO: 146955 - protein, 9 aa, Homo Sapiens
ISDLGQHTL

SEQ ID NO: 146956 - protein, 9 aa, Homo Sapiens
ISDLSEHVF

SEQ ID NO: 146957 - protein, 9 aa, Homo Sapiens
ISDLVKVTL

SEQ ID NO: 146958 - protein, 9 aa, Homo Sapiens
ISDPYNVNL

SEQ ID NO: 146959 - protein, 9 aa, Homo Sapiens
ISDSADCSL

SEQ ID NO: 146960 - protein, 9 aa, Homo Sapiens
ISDTQRISL

SEQ ID NO: 146961 - protein, 9 aa, Homo Sapiens
ISDYAVKIV

SEQ ID NO: 146962 - protein, 9 aa, Homo Sapiens
ISDYTVTEI

SEQ ID NO: 146963 - protein, 9 aa, Homo Sapiens
ITDLPSEVL

SEQ ID NO: 146964 - protein, 9 aa, Homo Sapiens
ITDPDVVHI

SEQ ID NO: 146965 - protein, 9 aa, Homo Sapiens
ITDPEVVFV

SEQ ID NO: 146966 - protein, 9 aa, Homo Sapiens
ITDPSVIVM

SEQ ID NO: 146967 - protein, 9 aa, Homo Sapiens
ITDSTGTHL

SEQ ID NO: 146968 - protein, 9 aa, Homo Sapiens
ITSMLNPLI

SEQ ID NO: 146969 - protein, 9 aa, Homo Sapiens
IVDAVGTML

SEQ ID NO: 146970 - protein, 9 aa, Homo Sapiens
IVDDCGGAF

SEQ ID NO: 146971 - protein, 9 aa, Homo Sapiens
IVDDFGTHL

SEQ ID NO: 146972 - protein, 9 aa, Homo Sapiens
IVDDPEGFF

SEQ ID NO: 146973 - protein, 9 aa, Homo Sapiens
IVDEAIYYF

SEQ ID NO: 146974 - protein, 9 aa, Homo Sapiens
IVDEVNGLI

SEQ ID NO: 146975 - protein, 9 aa, Homo Sapiens
IVDGAVVKF

SEQ ID NO: 146976 - protein, 9 aa, Homo Sapiens
IVDHQNDSF

SEQ ID NO: 146977 - protein, 9 aa, Homo Sapiens
IVDIPGTSV

SEQ ID NO: 146978 - protein, 9 aa, Homo Sapiens
IVDKNGRLV

SEQ ID NO: 146979 - protein, 9 aa, Homo Sapiens
IVDKSGRTL

SEQ ID NO: 146980 - protein, 9 aa, Homo Sapiens
IVDPQNQTM

SEQ ID NO: 146981 - protein, 9 aa, Homo Sapiens
IVDPVDSTL

SEQ ID NO: 146982 - protein, 9 aa, Homo Sapiens
IVDQEGSLL

SEQ ID NO: 146983 - protein, 9 aa, Homo Sapiens
IVDRGSTNL

SEQ ID NO: 146984 - protein, 9 aa, Homo Sapiens
IVDRPVTLV

SEQ ID NO: 146985 - protein, 9 aa, Homo Sapiens
IVDSARSIL

SEQ ID NO: 146986 - protein, 9 aa, Homo Sapiens
IVDTPCNEM

SEQ ID NO: 146987 - protein, 9 aa, Homo Sapiens
KADDPYAHL

SEQ ID NO: 146988 - protein, 9 aa, Homo Sapiens
KADEDPALF

SEQ ID NO: 146989 - protein, 9 aa, Homo Sapiens
KADEGLASL

SEQ ID NO: 146990 - protein, 9 aa, Homo Sapiens
KADGKIMAL

SEQ ID NO: 146991 - protein, 9 aa, Homo Sapiens
KADGVPVYL

SEQ ID NO: 146992 - protein, 9 aa, Homo Sapiens
KADIIVSEL

SEQ ID NO: 146993 - protein, 9 aa, Homo Sapiens
KADIPSVAF

SEQ ID NO: 146994 - protein, 9 aa, Homo Sapiens
KADLESESF

SEQ ID NO: 146995 - protein, 9 aa, Homo Sapiens
KADMNVHLL

SEQ ID NO: 146996 - protein, 9 aa, Homo Sapiens
KADMTCRGF

SEQ ID NO: 146997 - protein, 9 aa, Homo Sapiens
KADNVGSAL

SEQ ID NO: 146998 - protein, 9 aa, Homo Sapiens
KADPQGPEL

SEQ ID NO: 146999 - protein, 9 aa, Homo Sapiens
KADSDGPEF

SEQ ID NO: 147000 - protein, 9 aa, Homo Sapiens
KADSINKPF

SEQ ID NO: 147001 - protein, 9 aa, Homo Sapiens
KADSVVVLL

SEQ ID NO: 147002 - protein, 9 aa, Homo Sapiens
KADTEEEFL

SEQ ID NO: 147003 - protein, 9 aa, Homo Sapiens
KADVEEEFL

SEQ ID NO: 147004 - protein, 9 aa, Homo Sapiens
KADVEGELL

SEQ ID NO: 147005 - protein, 9 aa, Homo Sapiens
KADVVISAF

SEQ ID NO: 147006 - protein, 9 aa, Homo Sapiens
KADVVPVTL

SEQ ID NO: 147007 - protein, 9 aa, Homo Sapiens
KAEEPPSQL

SEQ ID NO: 147008 - protein, 9 aa, Homo Sapiens
KAEEVVSFV

SEQ ID NO: 147009 - protein, 9 aa, Homo Sapiens
KAEGSEIRL

SEQ ID NO: 147010 - protein, 9 aa, Homo Sapiens
KAPEPEEEI

SEQ ID NO: 147011 - protein, 9 aa, Homo Sapiens
KGDPVIYSL

SEQ ID NO: 147012 - protein, 9 aa, Homo Sapiens
KHLDVVTLL

SEQ ID NO: 147013 - protein, 9 aa, Homo Sapiens
KIDDKPVKI

SEQ ID NO: 147014 - protein, 9 aa, Homo Sapiens
KIDEKTAEL

SEQ ID NO: 147015 - protein, 9 aa, Homo Sapiens
KLDETGNSL

SEQ ID NO: 147016 - protein, 9 aa, Homo Sapiens
KLDHVVTII

SEQ ID NO: 147017 - protein, 9 aa, Homo Sapiens
KLDVGNAEV

SEQ ID NO: 147018 - protein, 9 aa, Homo Sapiens
KNDEGVTLL

SEQ ID NO: 147019 - protein, 9 aa, Homo Sapiens
KNDIPSSYM

SEQ ID NO: 147020 - protein, 9 aa, Homo Sapiens
KQDPYLVNF

SEQ ID NO: 147021 - protein, 9 aa, Homo Sapiens
KSDDLVVDV

SEQ ID NO: 147022 - protein, 9 aa, Homo Sapiens
KSDERLTAF

SEQ ID NO: 147023 - protein, 9 aa, Homo Sapiens
KSDERPVHI

SEQ ID NO: 147024 - protein, 9 aa, Homo Sapiens
KSDEVTQEI

SEQ ID NO: 147025 - protein, 9 aa, Homo Sapiens
KSDHPGISI

SEQ ID NO: 147026 - protein, 9 aa, Homo Sapiens
KSDPSIVRL

SEQ ID NO: 147027 - protein, 9 aa, Homo Sapiens
KSDQALHSF

SEQ ID NO: 147028 - protein, 9 aa, Homo Sapiens
KSDSPAIQL

SEQ ID NO: 147029 - protein, 9 aa, Homo Sapiens
KTDGSVVKL

SEQ ID NO: 147030 - protein, 9 aa, Homo Sapiens
KTDTGIVTV

SEQ ID NO: 147031 - protein, 9 aa, Homo Sapiens
KTDVTVVRF

SEQ ID NO: 147032 - protein, 9 aa, Homo Sapiens
KTDVVVNSV

SEQ ID NO: 147033 - protein, 9 aa, Homo Sapiens
KVDEAVAVL

SEQ ID NO: 147034 - protein, 9 aa, Homo Sapiens
KVDELTTEI

SEQ ID NO: 147035 - protein, 9 aa, Homo Sapiens
LADAINTEF

SEQ ID NO: 147036 - protein, 9 aa, Homo Sapiens
LADCKASEV

SEQ ID NO: 147037 - protein, 9 aa, Homo Sapiens
LADDSVRSL

SEQ ID NO: 147038 - protein, 9 aa, Homo Sapiens
LADEAEVHL

SEQ ID NO: 147039 - protein, 9 aa, Homo Sapiens
LADEKVETV

SEQ ID NO: 147040 - protein, 9 aa, Homo Sapiens
LADERNELL

SEQ ID NO: 147041 - protein, 9 aa, Homo Sapiens
LADEVITVF

SEQ ID NO: 147042 - protein, 9 aa, Homo Sapiens
LADGADEHL

SEQ ID NO: 147043 - protein, 9 aa, Homo Sapiens
LADGLKVVL

SEQ ID NO: 147044 - protein, 9 aa, Homo Sapiens
LADGVPVAL

SEQ ID NO: 147045 - protein, 9 aa, Homo Sapiens
LADHAARQL

SEQ ID NO: 147046 - protein, 9 aa, Homo Sapiens
LADHPDAPM

SEQ ID NO: 147047 - protein, 9 aa, Homo Sapiens
LADIAQSQL

SEQ ID NO: 147048 - protein, 9 aa, Homo Sapiens
LADKGEIRV

SEQ ID NO: 147049 - protein, 9 aa, Homo Sapiens
LADKNSELF

SEQ ID NO: 147050 - protein, 9 aa, Homo Sapiens
LADKNVPNL

SEQ ID NO: 147051 - protein, 9 aa, Homo Sapiens
LADLHPDVF

SEQ ID NO: 147052 - protein, 9 aa, Homo Sapiens
LADLQNDEV

SEQ ID NO: 147053 - protein, 9 aa, Homo Sapiens
LADMHSTEI

SEQ ID NO: 147054 - protein, 9 aa, Homo Sapiens
LADNDEVKF

SEQ ID NO: 147055 - protein, 9 aa, Homo Sapiens
LADQGEIRV

SEQ ID NO: 147056 - protein, 9 aa, Homo Sapiens
LADQMISRI

SEQ ID NO: 147057 - protein, 9 aa, Homo Sapiens
LADRNVTVL

SEQ ID NO: 147058 - protein, 9 aa, Homo Sapiens
LADSKEIFL

SEQ ID NO: 147059 - protein, 9 aa, Homo Sapiens
LADSVGHHL

SEQ ID NO: 147060 - protein, 9 aa, Homo Sapiens
LADVDPMQL

SEQ ID NO: 147061 - protein, 9 aa, Homo Sapiens
LADVMSEQL

SEQ ID NO: 147062 - protein, 9 aa, Homo Sapiens
LAEAGVAVF

SEQ ID NO: 147063 - protein, 9 aa, Homo Sapiens
LAEDPKVTL

SEQ ID NO: 147064 - protein, 9 aa, Homo Sapiens
LAEDTRTEL

SEQ ID NO: 147065 - protein, 9 aa, Homo Sapiens
LAEIAKVEL

SEQ ID NO: 147066 - protein, 9 aa, Homo Sapiens
LAEKSTVHM

SEQ ID NO: 147067 - protein, 9 aa, Homo Sapiens
LGDDPTSSF

SEQ ID NO: 147068 - protein, 9 aa, Homo Sapiens
LIDEPSAYL

SEQ ID NO: 147069 - protein, 9 aa, Homo Sapiens
LIDKPNLQF

SEQ ID NO: 147070 - protein, 9 aa, Homo Sapiens
LIDLPGTEL

SEQ ID NO: 147071 - protein, 9 aa, Homo Sapiens
LIFKPDLTL

SEQ ID NO: 147072 - protein, 9 aa, Homo Sapiens
LLDGGVINL

SEQ ID NO: 147073 - protein, 9 aa, Homo Sapiens
LLDSSHSEL

SEQ ID NO: 147074 - protein, 9 aa, Homo Sapiens
LLDVPTAAV

SEQ ID NO: 147075 - protein, 9 aa, Homo Sapiens
LSDEEIVKF

SEQ ID NO: 147076 - protein, 9 aa, Homo Sapiens
LSDEHAGVI

SEQ ID NO: 147077 - protein, 9 aa, Homo Sapiens
LSDGVVVQV

SEQ ID NO: 147078 - protein, 9 aa, Homo Sapiens
LSDKDPPKL

SEQ ID NO: 147079 - protein, 9 aa, Homo Sapiens
LSDLALHFL

SEQ ID NO: 147080 - protein, 9 aa, Homo Sapiens
LSDLCGTVM

SEQ ID NO: 147081 - protein, 9 aa, Homo Sapiens
LSDLTGSLL

SEQ ID NO: 147082 - protein, 9 aa, Homo Sapiens
LSDPIVNTL

SEQ ID NO: 147083 - protein, 9 aa, Homo Sapiens
LSDPQVHTV

SEQ ID NO: 147084 - protein, 9 aa, Homo Sapiens
LSDRKKVTL

SEQ ID NO: 147085 - protein, 9 aa, Homo Sapiens
LSEQGDVKL

SEQ ID NO: 147086 - protein, 9 aa, Homo Sapiens
LTDDGRVFL

SEQ ID NO: 147087 - protein, 9 aa, Homo Sapiens
LTDHGDVKL

SEQ ID NO: 147088 - protein, 9 aa, Homo Sapiens
LTDLPSPSF

SEQ ID NO: 147089 - protein, 9 aa, Homo Sapiens
LTDPAIVKV

SEQ ID NO: 147090 - protein, 9 aa, Homo Sapiens
LTEEGVIKV

SEQ ID NO: 147091 - protein, 9 aa, Homo Sapiens
LVDGPCTQV

SEQ ID NO: 147092 - protein, 9 aa, Homo Sapiens
LVDKDSTFL

SEQ ID NO: 147093 - protein, 9 aa, Homo Sapiens
MADEAGLDL

SEQ ID NO: 147094 - protein, 9 aa, Homo Sapiens
MADKCSPTL

SEQ ID NO: 147095 - protein, 9 aa, Homo Sapiens
MADPEVQQI

SEQ ID NO: 147096 - protein, 9 aa, Homo Sapiens
MADRGEARL

SEQ ID NO: 147097 - protein, 9 aa, Homo Sapiens
MADSGHYCV

SEQ ID NO: 147098 - protein, 9 aa, Homo Sapiens
MADTFLEHM

SEQ ID NO: 147099 - protein, 9 aa, Homo Sapiens
MIDRDNSVF

SEQ ID NO: 147100 - protein, 9 aa, Homo Sapiens
MLDEPTNHL

SEQ ID NO: 147101 - protein, 9 aa, Homo Sapiens
MLDPLEVHL

SEQ ID NO: 147102 - protein, 9 aa, Homo Sapiens
MPDSAAALL

SEQ ID NO: 147103 - protein, 9 aa, Homo Sapiens
MTDDKITEV

SEQ ID NO: 147104 - protein, 9 aa, Homo Sapiens
MTDDKTTKI

SEQ ID NO: 147105 - protein, 9 aa, Homo Sapiens
MTDEKTTKI

SEQ ID NO: 147106 - protein, 9 aa, Homo Sapiens
MTDPEMVEV

SEQ ID NO: 147107 - protein, 9 aa, Homo Sapiens
MVDDRLVTM

SEQ ID NO: 147108 - protein, 9 aa, Homo Sapiens
MVDGKPVNL

SEQ ID NO: 147109 - protein, 9 aa, Homo Sapiens
MVDPFHTLF

SEQ ID NO: 147110 - protein, 9 aa, Homo Sapiens
MVDSKPVNL

SEQ ID NO: 147111 - protein, 9 aa, Homo Sapiens
NADAIVVKL

SEQ ID NO: 147112 - protein, 9 aa, Homo Sapiens
NADGKIISL

SEQ ID NO: 147113 - protein, 9 aa, Homo Sapiens
NADIAVVEM

SEQ ID NO: 147114 - protein, 9 aa, Homo Sapiens
NADISGMKV

SEQ ID NO: 147115 - protein, 9 aa, Homo Sapiens
NADKIRVKI

SEQ ID NO: 147116 - protein, 9 aa, Homo Sapiens
NADKLTVKF

SEQ ID NO: 147117 - protein, 9 aa, Homo Sapiens
NADLRPSKL

SEQ ID NO: 147118 - protein, 9 aa, Homo Sapiens
NADPILISL

SEQ ID NO: 147119 - protein, 9 aa, Homo Sapiens
NADPQAVTM

SEQ ID NO: 147120 - protein, 9 aa, Homo Sapiens
NADSATRLL

SEQ ID NO: 147121 - protein, 9 aa, Homo Sapiens
NADSSNTAL

SEQ ID NO: 147122 - protein, 9 aa, Homo Sapiens
NADSSVQLL

SEQ ID NO: 147123 - protein, 9 aa, Homo Sapiens
NADSVQAKV

SEQ ID NO: 147124 - protein, 9 aa, Homo Sapiens
NADTPVSKF

SEQ ID NO: 147125 - protein, 9 aa, Homo Sapiens
NADTVSSKL

SEQ ID NO: 147126 - protein, 9 aa, Homo Sapiens
NADVALVNF

SEQ ID NO: 147127 - protein, 9 aa, Homo Sapiens
NADVQERLL

SEQ ID NO: 147128 - protein, 9 aa, Homo Sapiens
NAEAKITKL

SEQ ID NO: 147129 - protein, 9 aa, Homo Sapiens
NAEQHVTQL

SEQ ID NO: 147130 - protein, 9 aa, Homo Sapiens
NAIEGGTQL

SEQ ID NO: 147131 - protein, 9 aa, Homo Sapiens
NGDFLPTRL

SEQ ID NO: 147132 - protein, 9 aa, Homo Sapiens
NIDEGPLAF

SEQ ID NO: 147133 - protein, 9 aa, Homo Sapiens
NIDFMPTIL

SEQ ID NO: 147134 - protein, 9 aa, Homo Sapiens
NIDVVGVSF

SEQ ID NO: 147135 - protein, 9 aa, Homo Sapiens
NLDGTVTEM

SEQ ID NO: 147136 - protein, 9 aa, Homo Sapiens
NLDQPPAFF

SEQ ID NO: 147137 - protein, 9 aa, Homo Sapiens
NMDCPNHGF

SEQ ID NO: 147138 - protein, 9 aa, Homo Sapiens
NMDSPGPML

SEQ ID NO: 147139 - protein, 9 aa, Homo Sapiens
NSDEHAVVI

SEQ ID NO: 147140 - protein, 9 aa, Homo Sapiens
NSDPYSVAL

SEQ ID NO: 147141 - protein, 9 aa, Homo Sapiens
NSDSLPHRL

SEQ ID NO: 147142 - protein, 9 aa, Homo Sapiens
NSDTHSSTF

SEQ ID NO: 147143 - protein, 9 aa, Homo Sapiens
NTDEPPMVF

SEQ ID NO: 147144 - protein, 9 aa, Homo Sapiens
NVDAGKSTL

SEQ ID NO: 147145 - protein, 9 aa, Homo Sapiens
NVDAKIAKL

SEQ ID NO: 147146 - protein, 9 aa, Homo Sapiens
NVDDPTGNF

SEQ ID NO: 147147 - protein, 9 aa, Homo Sapiens
NVDGHLYEL

SEQ ID NO: 147148 - protein, 9 aa, Homo Sapiens
NVDPDNVVL

SEQ ID NO: 147149 - protein, 9 aa, Homo Sapiens
NVDPDSVVL

SEQ ID NO: 147150 - protein, 9 aa, Homo Sapiens
NVDSGKSTL

SEQ ID NO: 147151 - protein, 9 aa, Homo Sapiens
NVDSLITRL

SEQ ID NO: 147152 - protein, 9 aa, Homo Sapiens
NVDTPVSTL

SEQ ID NO: 147153 - protein, 9 aa, Homo Sapiens
PAYHSSLMD

SEQ ID NO: 147154 - protein, 9 aa, Homo Sapiens
PIRLLAAAA

SEQ ID NO: 147155 - protein, 9 aa, Homo Sapiens
PSIVHRKCF

SEQ ID NO: 147156 - protein, 9 aa, Homo Sapiens
QADAPNPGL

SEQ ID NO: 147157 - protein, 9 aa, Homo Sapiens
QADAPNPSL

SEQ ID NO: 147158 - protein, 9 aa, Homo Sapiens
QADARQVVL

SEQ ID NO: 147159 - protein, 9 aa, Homo Sapiens
QADCAVLIV

SEQ ID NO: 147160 - protein, 9 aa, Homo Sapiens
QADEVIAIL

SEQ ID NO: 147161 - protein, 9 aa, Homo Sapiens
QADFEAHNI

SEQ ID NO: 147162 - protein, 9 aa, Homo Sapiens
QADFKPATL

SEQ ID NO: 147163 - protein, 9 aa, Homo Sapiens
QADGRVVLV

SEQ ID NO: 147164 - protein, 9 aa, Homo Sapiens
QADHFNTRL

SEQ ID NO: 147165 - protein, 9 aa, Homo Sapiens
QADPSAPCL

SEQ ID NO: 147166 - protein, 9 aa, Homo Sapiens
QADQEAKEL

SEQ ID NO: 147167 - protein, 9 aa, Homo Sapiens
QADSGRVLL

SEQ ID NO: 147168 - protein, 9 aa, Homo Sapiens
QADSQSPKL

SEQ ID NO: 147169 - protein, 9 aa, Homo Sapiens
QSDEDVIRL

SEQ ID NO: 147170 - protein, 9 aa, Homo Sapiens
QSDPSGAYF

SEQ ID NO: 147171 - protein, 9 aa, Homo Sapiens
QTDQPETVI

SEQ ID NO: 147172 - protein, 9 aa, Homo Sapiens
QTDVGITHF

SEQ ID NO: 147173 - protein, 9 aa, Homo Sapiens
RADAPVALV

SEQ ID NO: 147174 - protein, 9 aa, Homo Sapiens
RADDARQLF

SEQ ID NO: 147175 - protein, 9 aa, Homo Sapiens
RADDTFEAL

SEQ ID NO: 147176 - protein, 9 aa, Homo Sapiens
RADEDARMI

SEQ ID NO: 147177 - protein, 9 aa, Homo Sapiens
RADEKITNI

SEQ ID NO: 147178 - protein, 9 aa, Homo Sapiens
RADEVKSMF

SEQ ID NO: 147179 - protein, 9 aa, Homo Sapiens
RADGENTAF

SEQ ID NO: 147180 - protein, 9 aa, Homo Sapiens
RADGISSTF

SEQ ID NO: 147181 - protein, 9 aa, Homo Sapiens
RADIGAASL

SEQ ID NO: 147182 - protein, 9 aa, Homo Sapiens
RADKIASKL

SEQ ID NO: 147183 - protein, 9 aa, Homo Sapiens
RADKPWTRL

SEQ ID NO: 147184 - protein, 9 aa, Homo Sapiens
RADLIEVVM

SEQ ID NO: 147185 - protein, 9 aa, Homo Sapiens
RADLTYAEF

SEQ ID NO: 147186 - protein, 9 aa, Homo Sapiens
RADPEPPGL

SEQ ID NO: 147187 - protein, 9 aa, Homo Sapiens
RADQFEYVM

SEQ ID NO: 147188 - protein, 9 aa, Homo Sapiens
RADQQYECV

SEQ ID NO: 147189 - protein, 9 aa, Homo Sapiens
RADSVGKLV

SEQ ID NO: 147190 - protein, 9 aa, Homo Sapiens
RADTGHAFL

SEQ ID NO: 147191 - protein, 9 aa, Homo Sapiens
RAEEGFTQV

SEQ ID NO: 147192 - protein, 9 aa, Homo Sapiens
RAEELGQEL

SEQ ID NO: 147193 - protein, 9 aa, Homo Sapiens
RAEEREIKF

SEQ ID NO: 147194 - protein, 9 aa, Homo Sapiens
RAELHPVEL

SEQ ID NO: 147195 - protein, 9 aa, Homo Sapiens
RGDDGGASF

SEQ ID NO: 147196 - protein, 9 aa, Homo Sapiens
RGDDTPLHL

SEQ ID NO: 147197 - protein, 9 aa, Homo Sapiens
RGDGKVIKL

SEQ ID NO: 147198 - protein, 9 aa, Homo Sapiens
RIEKNPARL

SEQ ID NO: 147199 - protein, 9 aa, Homo Sapiens
RMDAGEVTL

SEQ ID NO: 147200 - protein, 9 aa, Homo Sapiens
RMDEEFTKI

SEQ ID NO: 147201 - protein, 9 aa, Homo Sapiens
RQDLTTLDV

SEQ ID NO: 147202 - protein, 9 aa, Homo Sapiens
RQDPFTVHM

SEQ ID NO: 147203 - protein, 9 aa, Homo Sapiens
RQDVATNLL

SEQ ID NO: 147204 - protein, 9 aa, Homo Sapiens
RSDELTRHF

SEQ ID NO: 147205 - protein, 9 aa, Homo Sapiens
RSDGEAELL

SEQ ID NO: 147206 - protein, 9 aa, Homo Sapiens
RSDLYAVEM

SEQ ID NO: 147207 - protein, 9 aa, Homo Sapiens
RSDPGHYSF

SEQ ID NO: 147208 - protein, 9 aa, Homo Sapiens
RTDDKVIRF

SEQ ID NO: 147209 - protein, 9 aa, Homo Sapiens
RTDGKVFQF

SEQ ID NO: 147210 - protein, 9 aa, Homo Sapiens
RTDPVPVTI

SEQ ID NO: 147211 - protein, 9 aa, Homo Sapiens
RTDVPGELL

SEQ ID NO: 147212 - protein, 9 aa, Homo Sapiens
RTEEQPMEV

SEQ ID NO: 147213 - protein, 9 aa, Homo Sapiens
RVDAQPVKV

SEQ ID NO: 147214 - protein, 9 aa, Homo Sapiens
RVDAVASKV

SEQ ID NO: 147215 - protein, 9 aa, Homo Sapiens
RVDDPQDVF

SEQ ID NO: 147216 - protein, 9 aa, Homo Sapiens
RVDDVYSVL

SEQ ID NO: 147217 - protein, 9 aa, Homo Sapiens
RVDEEPTTL

SEQ ID NO: 147218 - protein, 9 aa, Homo Sapiens
RVDKNAPTV

SEQ ID NO: 147219 - protein, 9 aa, Homo Sapiens
RVDKQSALM

SEQ ID NO: 147220 - protein, 9 aa, Homo Sapiens
RVDNLAVVM

SEQ ID NO: 147221 - protein, 9 aa, Homo Sapiens
SADARSFEM

SEQ ID NO: 147222 - protein, 9 aa, Homo Sapiens
SADATPLHV

SEQ ID NO: 147223 - protein, 9 aa, Homo Sapiens
SADDKTVRL

SEQ ID NO: 147224 - protein, 9 aa, Homo Sapiens
SADDRCKVL

SEQ ID NO: 147225 - protein, 9 aa, Homo Sapiens
SADDWSEHI

SEQ ID NO: 147226 - protein, 9 aa, Homo Sapiens
SADEAHGLL

SEQ ID NO: 147227 - protein, 9 aa, Homo Sapiens
SADEGQTVF

SEQ ID NO: 147228 - protein, 9 aa, Homo Sapiens
SADELVTRI

SEQ ID NO: 147229 - protein, 9 aa, Homo Sapiens
SADEPMTTF

SEQ ID NO: 147230 - protein, 9 aa, Homo Sapiens
SADERILVI

SEQ ID NO: 147231 - protein, 9 aa, Homo Sapiens
SADEVMRFF

SEQ ID NO: 147232 - protein, 9 aa, Homo Sapiens
SADEVQRFF

SEQ ID NO: 147233 - protein, 9 aa, Homo Sapiens
SADFETVRM

SEQ ID NO: 147234 - protein, 9 aa, Homo Sapiens
SADFPALVV

SEQ ID NO: 147235 - protein, 9 aa, Homo Sapiens
SADFSPAFL

SEQ ID NO: 147236 - protein, 9 aa, Homo Sapiens
SADFTSENF

SEQ ID NO: 147237 - protein, 9 aa, Homo Sapiens
SADGARIMV

SEQ ID NO: 147238 - protein, 9 aa, Homo Sapiens
SADGKTITV

SEQ ID NO: 147239 - protein, 9 aa, Homo Sapiens
SADHLAHEV

SEQ ID NO: 147240 - protein, 9 aa, Homo Sapiens
SADHPVIKV

SEQ ID NO: 147241 - protein, 9 aa, Homo Sapiens
SADISLERL

SEQ ID NO: 147242 - protein, 9 aa, Homo Sapiens
SADKFQVLL

SEQ ID NO: 147243 - protein, 9 aa, Homo Sapiens
SADKGSLEV

SEQ ID NO: 147244 - protein, 9 aa, Homo Sapiens
SADKPDSVL

SEQ ID NO: 147245 - protein, 9 aa, Homo Sapiens
SADKPLSNM

SEQ ID NO: 147246 - protein, 9 aa, Homo Sapiens
SADKTVRVY

SEQ ID NO: 147247 - protein, 9 aa, Homo Sapiens
SADLIIQEF

SEQ ID NO: 147248 - protein, 9 aa, Homo Sapiens
SADLPESTL

SEQ ID NO: 147249 - protein, 9 aa, Homo Sapiens
SADMSHVAL

SEQ ID NO: 147250 - protein, 9 aa, Homo Sapiens
SADPNVVDL

SEQ ID NO: 147251 - protein, 9 aa, Homo Sapiens
SADPRPLAV

SEQ ID NO: 147252 - protein, 9 aa, Homo Sapiens
SADQAVAEL

SEQ ID NO: 147253 - protein, 9 aa, Homo Sapiens
SADQKTTLL

SEQ ID NO: 147254 - protein, 9 aa, Homo Sapiens
SADQSPSAL

SEQ ID NO: 147255 - protein, 9 aa, Homo Sapiens
SADQVTRAL

SEQ ID NO: 147256 - protein, 9 aa, Homo Sapiens
SADRFVTLL

SEQ ID NO: 147257 - protein, 9 aa, Homo Sapiens
SADSANDGF

SEQ ID NO: 147258 - protein, 9 aa, Homo Sapiens
SADSKPIDV

SEQ ID NO: 147259 - protein, 9 aa, Homo Sapiens
SADSKVLLF

SEQ ID NO: 147260 - protein, 9 aa, Homo Sapiens
SADSQRVVF

SEQ ID NO: 147261 - protein, 9 aa, Homo Sapiens
SADSRIAEL

SEQ ID NO: 147262 - protein, 9 aa, Homo Sapiens
SADSRIVKM

SEQ ID NO: 147263 - protein, 9 aa, Homo Sapiens
SADTFTRNL

SEQ ID NO: 147264 - protein, 9 aa, Homo Sapiens
SADTPEASL

SEQ ID NO: 147265 - protein, 9 aa, Homo Sapiens
SADTVVIFD

SEQ ID NO: 147266 - protein, 9 aa, Homo Sapiens
SADVAAVVM

SEQ ID NO: 147267 - protein, 9 aa, Homo Sapiens
SADVATPKM

SEQ ID NO: 147268 - protein, 9 aa, Homo Sapiens
SADVKEVLL

SEQ ID NO: 147269 - protein, 9 aa, Homo Sapiens
SADVRCSVF

SEQ ID NO: 147270 - protein, 9 aa, Homo Sapiens
SADVRQGEF

SEQ ID NO: 147271 - protein, 9 aa, Homo Sapiens
SAEAEASRL

SEQ ID NO: 147272 - protein, 9 aa, Homo Sapiens
SAEAVGVKI

SEQ ID NO: 147273 - protein, 9 aa, Homo Sapiens
SAEAVTTTL

SEQ ID NO: 147274 - protein, 9 aa, Homo Sapiens
SAEEMVTLL

SEQ ID NO: 147275 - protein, 9 aa, Homo Sapiens
SAEEVIVKL

SEQ ID NO: 147276 - protein, 9 aa, Homo Sapiens
SAEGHVTMF

SEQ ID NO: 147277 - protein, 9 aa, Homo Sapiens
SAEKAPVSV

SEQ ID NO: 147278 - protein, 9 aa, Homo Sapiens
SAEPKIMKV

SEQ ID NO: 147279 - protein, 9 aa, Homo Sapiens
SAEQAKVVL

SEQ ID NO: 147280 - protein, 9 aa, Homo Sapiens
SAESKTIEF

SEQ ID NO: 147281 - protein, 9 aa, Homo Sapiens
SDESLGIVI

SEQ ID NO: 147282 - protein, 9 aa, Homo Sapiens
SGDDGCVRL

SEQ ID NO: 147283 - protein, 9 aa, Homo Sapiens
SGDGVTHTV

SEQ ID NO: 147284 - protein, 9 aa, Homo Sapiens
SGDPKVIEV

SEQ ID NO: 147285 - protein, 9 aa, Homo Sapiens
SIDDLPTVL

SEQ ID NO: 147286 - protein, 9 aa, Homo Sapiens
SIDDVDSKL

SEQ ID NO: 147287 - protein, 9 aa, Homo Sapiens
SIDFGKTVV

SEQ ID NO: 147288 - protein, 9 aa, Homo Sapiens
SIDFKPSEI

SEQ ID NO: 147289 - protein, 9 aa, Homo Sapiens
SIDFPLTKV

SEQ ID NO: 147290 - protein, 9 aa, Homo Sapiens
SIDKAVTKL

SEQ ID NO: 147291 - protein, 9 aa, Homo Sapiens
SIDKKISRL

SEQ ID NO: 147292 - protein, 9 aa, Homo Sapiens
SIDKTGENF

SEQ ID NO: 147293 - protein, 9 aa, Homo Sapiens
SIDPVPTSI

SEQ ID NO: 147294 - protein, 9 aa, Homo Sapiens
SIDRNPPQL

SEQ ID NO: 147295 - protein, 9 aa, Homo Sapiens
SIDSEPALV

SEQ ID NO: 147296 - protein, 9 aa, Homo Sapiens
SIDTHGETF

SEQ ID NO: 147297 - protein, 9 aa, Homo Sapiens
SIDVGYERF

SEQ ID NO: 147298 - protein, 9 aa, Homo Sapiens
SLDDSCSQL

SEQ ID NO: 147299 - protein, 9 aa, Homo Sapiens
SLDIPATYL

SEQ ID NO: 147300 - protein, 9 aa, Homo Sapiens
SLDLPHSEL

SEQ ID NO: 147301 - protein, 9 aa, Homo Sapiens
SLDQPGGTL

SEQ ID NO: 147302 - protein, 9 aa, Homo Sapiens
SLDQPTQTV

SEQ ID NO: 147303 - protein, 9 aa, Homo Sapiens
SLDRPFTNL

SEQ ID NO: 147304 - protein, 9 aa, Homo Sapiens
SMDPLPVFL

SEQ ID NO: 147305 - protein, 9 aa, Homo Sapiens
SNDPDVIKL

SEQ ID NO: 147306 - protein, 9 aa, Homo Sapiens
SQDAKPTCL

SEQ ID NO: 147307 - protein, 9 aa, Homo Sapiens
SQDPGAVVL

SEQ ID NO: 147308 - protein, 9 aa, Homo Sapiens
SQDPGTHVV

SEQ ID NO: 147309 - protein, 9 aa, Homo Sapiens
SSDDGRVLI

SEQ ID NO: 147310 - protein, 9 aa, Homo Sapiens
SSDDGTVKI

SEQ ID NO: 147311 - protein, 9 aa, Homo Sapiens
SSDEPMTTF

SEQ ID NO: 147312 - protein, 9 aa, Homo Sapiens
SSDGHEFIV

SEQ ID NO: 147313 - protein, 9 aa, Homo Sapiens
SSDLPGGEF

SEQ ID NO: 147314 - protein, 9 aa, Homo Sapiens
SSDPKVLTL

SEQ ID NO: 147315 - protein, 9 aa, Homo Sapiens
SSDPMLSEF

SEQ ID NO: 147316 - protein, 9 aa, Homo Sapiens
SSDSSPPEV

SEQ ID NO: 147317 - protein, 9 aa, Homo Sapiens
SSDSTHVTF

SEQ ID NO: 147318 - protein, 9 aa, Homo Sapiens
SSDTGKVKL

SEQ ID NO: 147319 - protein, 9 aa, Homo Sapiens
STDEEVTSL

SEQ ID NO: 147320 - protein, 9 aa, Homo Sapiens
STDFPSTSI

SEQ ID NO: 147321 - protein, 9 aa, Homo Sapiens
STDNGRIFL

SEQ ID NO: 147322 - protein, 9 aa, Homo Sapiens
STDPAAPNL

SEQ ID NO: 147323 - protein, 9 aa, Homo Sapiens
STDQVGEFF

SEQ ID NO: 147324 - protein, 9 aa, Homo Sapiens
STDSRPVSV

SEQ ID NO: 147325 - protein, 9 aa, Homo Sapiens
STDVCGTKL

SEQ ID NO: 147326 - protein, 9 aa, Homo Sapiens
STDYETHEF

SEQ ID NO: 147327 - protein, 9 aa, Homo Sapiens
SVDAHTAEV

SEQ ID NO: 147328 - protein, 9 aa, Homo Sapiens
SVDETTQAM

SEQ ID NO: 147329 - protein, 9 aa, Homo Sapiens
SVDGDTRMV

SEQ ID NO: 147330 - protein, 9 aa, Homo Sapiens
SVDKPGIVV

SEQ ID NO: 147331 - protein, 9 aa, Homo Sapiens
SVDPAGVTM

SEQ ID NO: 147332 - protein, 9 aa, Homo Sapiens
SVDSKPPVI

SEQ ID NO: 147333 - protein, 9 aa, Homo Sapiens
SVDTRCSSL

SEQ ID NO: 147334 - protein, 9 aa, Homo Sapiens
SVDVTNTTF

SEQ ID NO: 147335 - protein, 9 aa, Homo Sapiens
SVDWPESSL

SEQ ID NO: 147336 - protein, 9 aa, Homo Sapiens
TADAFIVRF

SEQ ID NO: 147337 - protein, 9 aa, Homo Sapiens
TADAMNREV

SEQ ID NO: 147338 - protein, 9 aa, Homo Sapiens
TADCPGHGL

SEQ ID NO: 147339 - protein, 9 aa, Homo Sapiens
TADDKKLQF

SEQ ID NO: 147340 - protein, 9 aa, Homo Sapiens
TADDPSLSL

SEQ ID NO: 147341 - protein, 9 aa, Homo Sapiens
TADEFYSTM

SEQ ID NO: 147342 - protein, 9 aa, Homo Sapiens
TADEIQNTL

SEQ ID NO: 147343 - protein, 9 aa, Homo Sapiens
TADEVHYFL

SEQ ID NO: 147344 - protein, 9 aa, Homo Sapiens
TADFPPSKL

SEQ ID NO: 147345 - protein, 9 aa, Homo Sapiens
TADGAHFEL

SEQ ID NO: 147346 - protein, 9 aa, Homo Sapiens
TADGGQISL

SEQ ID NO: 147347 - protein, 9 aa, Homo Sapiens
TADGRVVKL

SEQ ID NO: 147348 - protein, 9 aa, Homo Sapiens
TADHGPPRL

SEQ ID NO: 147349 - protein, 9 aa, Homo Sapiens
TADIPALFL

SEQ ID NO: 147350 - protein, 9 aa, Homo Sapiens
TADISDVWL

SEQ ID NO: 147351 - protein, 9 aa, Homo Sapiens
TADKQSVHI

SEQ ID NO: 147352 - protein, 9 aa, Homo Sapiens
TADLDITEI

SEQ ID NO: 147353 - protein, 9 aa, Homo Sapiens
TADPLDYRL

SEQ ID NO: 147354 - protein, 9 aa, Homo Sapiens
TADRIPIAV

SEQ ID NO: 147355 - protein, 9 aa, Homo Sapiens
TADRWRVSL

SEQ ID NO: 147356 - protein, 9 aa, Homo Sapiens
TADSQPPVF

SEQ ID NO: 147357 - protein, 9 aa, Homo Sapiens
TADTKIQRM

SEQ ID NO: 147358 - protein, 9 aa, Homo Sapiens
TADTLFQEV

SEQ ID NO: 147359 - protein, 9 aa, Homo Sapiens
TADTSKVSL

SEQ ID NO: 147360 - protein, 9 aa, Homo Sapiens
TADVKASVL

SEQ ID NO: 147361 - protein, 9 aa, Homo Sapiens
TADVSHTNL

SEQ ID NO: 147362 - protein, 9 aa, Homo Sapiens
TAEHPGTRL

SEQ ID NO: 147363 - protein, 9 aa, Homo Sapiens
TAELDPHIL

SEQ ID NO: 147364 - protein, 9 aa, Homo Sapiens
TGDVPHTSV

SEQ ID NO: 147365 - protein, 9 aa, Homo Sapiens
TIDADAPEL

SEQ ID NO: 147366 - protein, 9 aa, Homo Sapiens
TIDCGLVRL

SEQ ID NO: 147367 - protein, 9 aa, Homo Sapiens
TIDDTISKF

SEQ ID NO: 147368 - protein, 9 aa, Homo Sapiens
TIDESLSEL

SEQ ID NO: 147369 - protein, 9 aa, Homo Sapiens
TIDGQQTII

SEQ ID NO: 147370 - protein, 9 aa, Homo Sapiens
TIDPIPHQL

SEQ ID NO: 147371 - protein, 9 aa, Homo Sapiens
TIDTENSTV

SEQ ID NO: 147372 - protein, 9 aa, Homo Sapiens
TIEDGIFEV

SEQ ID NO: 147373 - protein, 9 aa, Homo Sapiens
TLDAGNIKL

SEQ ID NO: 147374 - protein, 9 aa, Homo Sapiens
TQDELRSLF

SEQ ID NO: 147375 - protein, 9 aa, Homo Sapiens
TQDLPGVKL

SEQ ID NO: 147376 - protein, 9 aa, Homo Sapiens
TSDAQPHAF

SEQ ID NO: 147377 - protein, 9 aa, Homo Sapiens
TSDDVAKEF

SEQ ID NO: 147378 - protein, 9 aa, Homo Sapiens
TSDEQNHLV

SEQ ID NO: 147379 - protein, 9 aa, Homo Sapiens
TSDLPSSKV

SEQ ID NO: 147380 - protein, 9 aa, Homo Sapiens
TSDMGSYAL

SEQ ID NO: 147381 - protein, 9 aa, Homo Sapiens
TSDNPVVQL

SEQ ID NO: 147382 - protein, 9 aa, Homo Sapiens
TSDPAEVLV

SEQ ID NO: 147383 - protein, 9 aa, Homo Sapiens
TSDPALNHV

SEQ ID NO: 147384 - protein, 9 aa, Homo Sapiens
TSDPNAVVM

SEQ ID NO: 147385 - protein, 9 aa, Homo Sapiens
TTDPKLAHM

SEQ ID NO: 147386 - protein, 9 aa, Homo Sapiens
TVDADDVRL

SEQ ID NO: 147387 - protein, 9 aa, Homo Sapiens
TVDDPYATF

SEQ ID NO: 147388 - protein, 9 aa, Homo Sapiens
TVDGPSGKL

SEQ ID NO: 147389 - protein, 9 aa, Homo Sapiens
TVDGSPHEL

SEQ ID NO: 147390 - protein, 9 aa, Homo Sapiens
TVDTPHGIF

SEQ ID NO: 147391 - protein, 9 aa, Homo Sapiens
VADAFLSKF

SEQ ID NO: 147392 - protein, 9 aa, Homo Sapiens
VADAIRTSL

SEQ ID NO: 147393 - protein, 9 aa, Homo Sapiens
VADAVTYQL

SEQ ID NO: 147394 - protein, 9 aa, Homo Sapiens
VADDPIVMV

SEQ ID NO: 147395 - protein, 9 aa, Homo Sapiens
VADDQKLMI

SEQ ID NO: 147396 - protein, 9 aa, Homo Sapiens
VADDTPVLL

SEQ ID NO: 147397 - protein, 9 aa, Homo Sapiens
VADEAGQRL

SEQ ID NO: 147398 - protein, 9 aa, Homo Sapiens
VADEDSVKV

SEQ ID NO: 147399 - protein, 9 aa, Homo Sapiens
VADEELVHL

SEQ ID NO: 147400 - protein, 9 aa, Homo Sapiens
VADEGICYL

SEQ ID NO: 147401 - protein, 9 aa, Homo Sapiens
VADELVAEF

SEQ ID NO: 147402 - protein, 9 aa, Homo Sapiens
VADEMDVML

SEQ ID NO: 147403 - protein, 9 aa, Homo Sapiens
VADEQNRAL

SEQ ID NO: 147404 - protein, 9 aa, Homo Sapiens
VADEQQRLM

SEQ ID NO: 147405 - protein, 9 aa, Homo Sapiens
VADFGSATF

SEQ ID NO: 147406 - protein, 9 aa, Homo Sapiens
VADGLFSKF

SEQ ID NO: 147407 - protein, 9 aa, Homo Sapiens
VADGLITTL

SEQ ID NO: 147408 - protein, 9 aa, Homo Sapiens
VADGLVTTL

SEQ ID NO: 147409 - protein, 9 aa, Homo Sapiens
VADGPAVEV

SEQ ID NO: 147410 - protein, 9 aa, Homo Sapiens
VADGYPVRL

SEQ ID NO: 147411 - protein, 9 aa, Homo Sapiens
VADHPGIDF

SEQ ID NO: 147412 - protein, 9 aa, Homo Sapiens
VADIDGSTF

SEQ ID NO: 147413 - protein, 9 aa, Homo Sapiens
VADKDHPKF

SEQ ID NO: 147414 - protein, 9 aa, Homo Sapiens
VADKDTVLL

SEQ ID NO: 147415 - protein, 9 aa, Homo Sapiens
VADLQLIDF

SEQ ID NO: 147416 - protein, 9 aa, Homo Sapiens
VADLREAIL

SEQ ID NO: 147417 - protein, 9 aa, Homo Sapiens
VADLTGELM

SEQ ID NO: 147418 - protein, 9 aa, Homo Sapiens
VADMAAYQL

SEQ ID NO: 147419 - protein, 9 aa, Homo Sapiens
VADMVKQFF

SEQ ID NO: 147420 - protein, 9 aa, Homo Sapiens
VADPDNPLV

SEQ ID NO: 147421 - protein, 9 aa, Homo Sapiens
VADPIIYVL

SEQ ID NO: 147422 - protein, 9 aa, Homo Sapiens
VADPPIARL

SEQ ID NO: 147423 - protein, 9 aa, Homo Sapiens
VADPVEAVL

SEQ ID NO: 147424 - protein, 9 aa, Homo Sapiens
VADPVYRTF

SEQ ID NO: 147425 - protein, 9 aa, Homo Sapiens
VADPYVVIM

SEQ ID NO: 147426 - protein, 9 aa, Homo Sapiens
VADQIVTKL

SEQ ID NO: 147427 - protein, 9 aa, Homo Sapiens
VADRLGLEL

SEQ ID NO: 147428 - protein, 9 aa, Homo Sapiens
VADRLLVEL

SEQ ID NO: 147429 - protein, 9 aa, Homo Sapiens
VADSGSNQL

SEQ ID NO: 147430 - protein, 9 aa, Homo Sapiens
VADSTPAHF

SEQ ID NO: 147431 - protein, 9 aa, Homo Sapiens
VADTFQDYF

SEQ ID NO: 147432 - protein, 9 aa, Homo Sapiens
VADTVARVL

SEQ ID NO: 147433 - protein, 9 aa, Homo Sapiens
VADTVYRAL

SEQ ID NO: 147434 - protein, 9 aa, Homo Sapiens
VADVVVSRW

SEQ ID NO: 147435 - protein, 9 aa, Homo Sapiens
VADYEATTF

SEQ ID NO: 147436 - protein, 9 aa, Homo Sapiens
VAEAGGGQL

SEQ ID NO: 147437 - protein, 9 aa, Homo Sapiens
VAEERGAVL

SEQ ID NO: 147438 - protein, 9 aa, Homo Sapiens
VAEGPGAEL

SEQ ID NO: 147439 - protein, 9 aa, Homo Sapiens
VAEHHVATL

SEQ ID NO: 147440 - protein, 9 aa, Homo Sapiens
VAEQPPLKL

SEQ ID NO: 147441 - protein, 9 aa, Homo Sapiens
VAESAVSKL

SEQ ID NO: 147442 - protein, 9 aa, Homo Sapiens
VAETHIVLL

SEQ ID NO: 147443 - protein, 9 aa, Homo Sapiens
VAETPDIKL

SEQ ID NO: 147444 - protein, 9 aa, Homo Sapiens
VGDEGAGHF

SEQ ID NO: 147445 - protein, 9 aa, Homo Sapiens
VGDGYVVHL

SEQ ID NO: 147446 - protein, 9 aa, Homo Sapiens
VGDIPGVRF

SEQ ID NO: 147447 - protein, 9 aa, Homo Sapiens
VGDKPVNNF

SEQ ID NO: 147448 - protein, 9 aa, Homo Sapiens
VGDKPVSNF

SEQ ID NO: 147449 - protein, 9 aa, Homo Sapiens
VGDPHTVTV

SEQ ID NO: 147450 - protein, 9 aa, Homo Sapiens
VGDPSTTNL

SEQ ID NO: 147451 - protein, 9 aa, Homo Sapiens
VGDTQVVVF

SEQ ID NO: 147452 - protein, 9 aa, Homo Sapiens
VIDGHIYAV

SEQ ID NO: 147453 - protein, 9 aa, Homo Sapiens
VIDPVPAAV

SEQ ID NO: 147454 - protein, 9 aa, Homo Sapiens
VIDSGYCKL

SEQ ID NO: 147455 - protein, 9 aa, Homo Sapiens
VIDVVPPKF

SEQ ID NO: 147456 - protein, 9 aa, Homo Sapiens
VKDVPNSQL

SEQ ID NO: 147457 - protein, 9 aa, Homo Sapiens
VLDEAGSTV

SEQ ID NO: 147458 - protein, 9 aa, Homo Sapiens
VLDEGSASV

SEQ ID NO: 147459 - protein, 9 aa, Homo Sapiens
VLDEPGQDL

SEQ ID NO: 147460 - protein, 9 aa, Homo Sapiens
VLDEVVTVL

SEQ ID NO: 147461 - protein, 9 aa, Homo Sapiens
VLDNPTPEM

SEQ ID NO: 147462 - protein, 9 aa, Homo Sapiens
VLDVVERSL

SEQ ID NO: 147463 - protein, 9 aa, Homo Sapiens
VLEPYPSKL

SEQ ID NO: 147464 - protein, 9 aa, Homo Sapiens
VMDSKIVQV

SEQ ID NO: 147465 - protein, 9 aa, Homo Sapiens
VNDQGVVKV

SEQ ID NO: 147466 - protein, 9 aa, Homo Sapiens
VQDAVDALM

SEQ ID NO: 147467 - protein, 9 aa, Homo Sapiens
VQDEMLARF

SEQ ID NO: 147468 - protein, 9 aa, Homo Sapiens
VQDESHSEW

SEQ ID NO: 147469 - protein, 9 aa, Homo Sapiens
VQDLIEGHL

SEQ ID NO: 147470 - protein, 9 aa, Homo Sapiens
VQDPKVTYL

SEQ ID NO: 147471 - protein, 9 aa, Homo Sapiens
VQDRPESSL

SEQ ID NO: 147472 - protein, 9 aa, Homo Sapiens
VSDDGTLHM

SEQ ID NO: 147473 - protein, 9 aa, Homo Sapiens
VSDDTVMHL

SEQ ID NO: 147474 - protein, 9 aa, Homo Sapiens
VSDEKRTEL

SEQ ID NO: 147475 - protein, 9 aa, Homo Sapiens
VSDFGGRSL

SEQ ID NO: 147476 - protein, 9 aa, Homo Sapiens
VSDFGQSHL

SEQ ID NO: 147477 - protein, 9 aa, Homo Sapiens
VSDHFPVEF

SEQ ID NO: 147478 - protein, 9 aa, Homo Sapiens
VSDKPDIIS

SEQ ID NO: 147479 - protein, 9 aa, Homo Sapiens
VSDKPTVTF

SEQ ID NO: 147480 - protein, 9 aa, Homo Sapiens
VSDLGPVVL

SEQ ID NO: 147481 - protein, 9 aa, Homo Sapiens
VSDLQHVTL

SEQ ID NO: 147482 - protein, 9 aa, Homo Sapiens
VSDLSEHVF

SEQ ID NO: 147483 - protein, 9 aa, Homo Sapiens
VSDNIIAKL

SEQ ID NO: 147484 - protein, 9 aa, Homo Sapiens
VSDPEEMEL

SEQ ID NO: 147485 - protein, 9 aa, Homo Sapiens
VSDPNLIHV

SEQ ID NO: 147486 - protein, 9 aa, Homo Sapiens
VSDPVTVHF

SEQ ID NO: 147487 - protein, 9 aa, Homo Sapiens
VSDQANHVL

SEQ ID NO: 147488 - protein, 9 aa, Homo Sapiens
VSDSGAHVL

SEQ ID NO: 147489 - protein, 9 aa, Homo Sapiens
VSDVPSLSV

SEQ ID NO: 147490 - protein, 9 aa, Homo Sapiens
VSENDVIRL

SEQ ID NO: 147491 - protein, 9 aa, Homo Sapiens
VSEVHPSRL

SEQ ID NO: 147492 - protein, 9 aa, Homo Sapiens
VTDADRSIL

SEQ ID NO: 147493 - protein, 9 aa, Homo Sapiens
VTDGKEVLL

SEQ ID NO: 147494 - protein, 9 aa, Homo Sapiens
VTDHNLHEL

SEQ ID NO: 147495 - protein, 9 aa, Homo Sapiens
VTDLGTAEL

SEQ ID NO: 147496 - protein, 9 aa, Homo Sapiens
VTDPRVVDL

SEQ ID NO: 147497 - protein, 9 aa, Homo Sapiens
VTDSGRTVI

SEQ ID NO: 147498 - protein, 9 aa, Homo Sapiens
VTDTGALYL

SEQ ID NO: 147499 - protein, 9 aa, Homo Sapiens
VTEPDHPVL

SEQ ID NO: 147500 - protein, 9 aa, Homo Sapiens
VVDAGKVTL

SEQ ID NO: 147501 - protein, 9 aa, Homo Sapiens
VVDAIPVFL

SEQ ID NO: 147502 - protein, 9 aa, Homo Sapiens
VVDAVVTQV

SEQ ID NO: 147503 - protein, 9 aa, Homo Sapiens
VVDDIVSKL

SEQ ID NO: 147504 - protein, 9 aa, Homo Sapiens
VVDEADTML

SEQ ID NO: 147505 - protein, 9 aa, Homo Sapiens
VVDEKISAM

SEQ ID NO: 147506 - protein, 9 aa, Homo Sapiens
VVDKPEQTV

SEQ ID NO: 147507 - protein, 9 aa, Homo Sapiens
VVDKPPSTM

SEQ ID NO: 147508 - protein, 9 aa, Homo Sapiens
VVDPNDPQM

SEQ ID NO: 147509 - protein, 9 aa, Homo Sapiens
VVDQGSTNL

SEQ ID NO: 147510 - protein, 9 aa, Homo Sapiens
VVDVGSTEV

SEQ ID NO: 147511 - protein, 9 aa, Homo Sapiens
VVEDGILKL

SEQ ID NO: 147512 - protein, 9 aa, Homo Sapiens
YADGGGCKL

SEQ ID NO: 147513 - protein, 9 aa, Homo Sapiens
YADKEETKL

SEQ ID NO: 147514 - protein, 9 aa, Homo Sapiens
YADLNQNDF

SEQ ID NO: 147515 - protein, 9 aa, Homo Sapiens
YADPVSAQH

SEQ ID NO: 147516 - protein, 9 aa, Homo Sapiens
YADQHSVQV

SEQ ID NO: 147517 - protein, 9 aa, Homo Sapiens
YADQLKEYL

SEQ ID NO: 147518 - protein, 9 aa, Homo Sapiens
YADSSIAEL

SEQ ID NO: 147519 - protein, 9 aa, Homo Sapiens
YADTQEINL

SEQ ID NO: 147520 - protein, 9 aa, Homo Sapiens
YADVGGKQF

SEQ ID NO: 147521 - protein, 9 aa, Homo Sapiens
YADVQKDGV

SEQ ID NO: 147522 - protein, 9 aa, Homo Sapiens
YADYEESRM

SEQ ID NO: 147523 - protein, 9 aa, Homo Sapiens
YAECYPATM

SEQ ID NO: 147524 - protein, 9 aa, Homo Sapiens
YAEEFRTYL

SEQ ID NO: 147525 - protein, 9 aa, Homo Sapiens
YAEHPGDCL

SEQ ID NO: 147526 - protein, 9 aa, Homo Sapiens
YAEQLHVQL

SEQ ID NO: 147527 - protein, 9 aa, Homo Sapiens
YAERDIVQF

SEQ ID NO: 147528 - protein, 9 aa, Homo Sapiens
YAEVGRVLL

SEQ ID NO: 147529 - protein, 9 aa, Homo Sapiens
YGDIKDVRL

SEQ ID NO: 147530 - protein, 9 aa, Homo Sapiens
YGEDDFSRL

SEQ ID NO: 147531 - protein, 9 aa, Homo Sapiens
YIDEGRLVL

SEQ ID NO: 147532 - protein, 9 aa, Homo Sapiens
YIDHGDPQV

SEQ ID NO: 147533 - protein, 9 aa, Homo Sapiens
YIDLPPPRL

SEQ ID NO: 147534 - protein, 9 aa, Homo Sapiens
YIDQGIAEL

SEQ ID NO: 147535 - protein, 9 aa, Homo Sapiens
YIDRDSEYL

SEQ ID NO: 147536 - protein, 9 aa, Homo Sapiens
YLDEYIARM

SEQ ID NO: 147537 - protein, 9 aa, Homo Sapiens
YLDNGVVFV

SEQ ID NO: 147538 - protein, 9 aa, Homo Sapiens
YLEAGGTKV

SEQ ID NO: 147539 - protein, 9 aa, Homo Sapiens
YLEDSPLEL

SEQ ID NO: 147540 - protein, 9 aa, Homo Sapiens
YLEEPLTQV

SEQ ID NO: 147541 - protein, 9 aa, Homo Sapiens
YNDQGQVRL

SEQ ID NO: 147542 - protein, 9 aa, Homo Sapiens
YQDLLNVKM

SEQ ID NO: 147543 - protein, 9 aa, Homo Sapiens
YQDTHPERL

SEQ ID NO: 147544 - protein, 9 aa, Homo Sapiens
YQDTPGVKM

SEQ ID NO: 147545 - protein, 9 aa, Homo Sapiens
YSDAPVSEL

SEQ ID NO: 147546 - protein, 9 aa, Homo Sapiens
YSDATTSKI

SEQ ID NO: 147547 - protein, 9 aa, Homo Sapiens
YSDDIPHAL

SEQ ID NO: 147548 - protein, 9 aa, Homo Sapiens
YSDGKLQTV

SEQ ID NO: 147549 - protein, 9 aa, Homo Sapiens
YSDGPGEAL

SEQ ID NO: 147550 - protein, 9 aa, Homo Sapiens
YSDLRKESM

SEQ ID NO: 147551 - protein, 9 aa, Homo Sapiens
YSDPILVQT

SEQ ID NO: 147552 - protein, 9 aa, Homo Sapiens
YSDSFPMEL

SEQ ID NO: 147553 - protein, 9 aa, Homo Sapiens
YSDVEHTSV

SEQ ID NO: 147554 - protein, 9 aa, Homo Sapiens
YTDATPLRV

SEQ ID NO: 147555 - protein, 9 aa, Homo Sapiens
YTDEPVSKI

SEQ ID NO: 147556 - protein, 9 aa, Homo Sapiens
YTDFDGTRV

SEQ ID NO: 147557 - protein, 9 aa, Homo Sapiens
YTDHQFTEL

SEQ ID NO: 147558 - protein, 9 aa, Homo Sapiens
YTDLPNRQL

SEQ ID NO: 147559 - protein, 9 aa, Homo Sapiens
YTDVTPRQF

SEQ ID NO: 147560 - protein, 9 aa, Homo Sapiens
YVDDGLISL

SEQ ID NO: 147561 - protein, 9 aa, Homo Sapiens
YVDEHGTRL

SEQ ID NO: 147562 - protein, 9 aa, Homo Sapiens
YVDESRECV

SEQ ID NO: 147563 - protein, 9 aa, Homo Sapiens
YVDEVMTRL

SEQ ID NO: 147564 - protein, 9 aa, Homo Sapiens
YVDGRVLVV

SEQ ID NO: 147565 - protein, 9 aa, Homo Sapiens
YVDISENHL

SEQ ID NO: 147566 - protein, 9 aa, Homo Sapiens
YVDTAVRHV

SEQ ID NO: 147567 - protein, 9 aa, Homo Sapiens
YVDVVKVLL

SEQ ID NO: 147568 - protein, 10 aa, Homo Sapiens
AADAEMTTRM

SEQ ID NO: 147569 - protein, 10 aa, Homo Sapiens
AADDCAKAVM

SEQ ID NO: 147570 - protein, 10 aa, Homo Sapiens
AADFEIGHFL

SEQ ID NO: 147571 - protein, 10 aa, Homo Sapiens
AADGGLRASV

SEQ ID NO: 147572 - protein, 10 aa, Homo Sapiens
AADGGPRVSF

SEQ ID NO: 147573 - protein, 10 aa, Homo Sapiens
AADGKGVVVV

SEQ ID NO: 147574 - protein, 10 aa, Homo Sapiens
AADGRGLQTV

SEQ ID NO: 147575 - protein, 10 aa, Homo Sapiens
AADGTNVVKL

SEQ ID NO: 147576 - protein, 10 aa, Homo Sapiens
AADIDTRSEF

SEQ ID NO: 147577 - protein, 10 aa, Homo Sapiens
AADKAAVVKF

SEQ ID NO: 147578 - protein, 10 aa, Homo Sapiens
AADPGLHETL

SEQ ID NO: 147579 - protein, 10 aa, Homo Sapiens
AADPGLPARL

SEQ ID NO: 147580 - protein, 10 aa, Homo Sapiens
AADTPPLETL

SEQ ID NO: 147581 - protein, 10 aa, Homo Sapiens
AADVAQSTHV

SEQ ID NO: 147582 - protein, 10 aa, Homo Sapiens
ASDKPSQETL

SEQ ID NO: 147583 - protein, 10 aa, Homo Sapiens
AVDESNDHML

SEQ ID NO: 147584 - protein, 10 aa, Homo Sapiens
AVDGKEMVTM

SEQ ID NO: 147585 - protein, 10 aa, Homo Sapiens
EEQLQQIRAE

SEQ ID NO: 147586 - protein, 10 aa, Homo Sapiens
ESDSAKPASL

SEQ ID NO: 147587 - protein, 10 aa, Homo Sapiens
FADDNRFDFL

SEQ ID NO: 147588 - protein, 10 aa, Homo Sapiens
FADDPCSSVK

SEQ ID NO: 147589 - protein, 10 aa, Homo Sapiens
FADGHVLELL

SEQ ID NO: 147590 - protein, 10 aa, Homo Sapiens
FADGVPREGL

SEQ ID NO: 147591 - protein, 10 aa, Homo Sapiens
FADKETLIQF

SEQ ID NO: 147592 - protein, 10 aa, Homo Sapiens
FADSDSHSSF

SEQ ID NO: 147593 - protein, 10 aa, Homo Sapiens
FIDGGGSVLV

SEQ ID NO: 147594 - protein, 10 aa, Homo Sapiens
FIDKNGETEL

SEQ ID NO: 147595 - protein, 10 aa, Homo Sapiens
FSETGAGKHV

SEQ ID NO: 147596 - protein, 10 aa, Homo Sapiens
FTDEESRVFL

SEQ ID NO: 147597 - protein, 10 aa, Homo Sapiens
FTDTDCVVRF

SEQ ID NO: 147598 - protein, 10 aa, Homo Sapiens
FVDCPGHDIL

SEQ ID NO: 147599 - protein, 10 aa, Homo Sapiens
FVDDGTETHF

SEQ ID NO: 147600 - protein, 10 aa, Homo Sapiens
FVDTDADTRL

SEQ ID NO: 147601 - protein, 10 aa, Homo Sapiens
FVDTSDCTVM

SEQ ID NO: 147602 - protein, 10 aa, Homo Sapiens
FVEDASGKGL

SEQ ID NO: 147603 - protein, 10 aa, Homo Sapiens
GADLPNLLFY

SEQ ID NO: 147604 - protein, 10 aa, Homo Sapiens
GPSIVHRKCF

SEQ ID NO: 147605 - protein, 10 aa, Homo Sapiens
HADDCVGLEL

SEQ ID NO: 147606 - protein, 10 aa, Homo Sapiens
HADSNIVIML

SEQ ID NO: 147607 - protein, 10 aa, Homo Sapiens
HIDGDHLTLL

SEQ ID NO: 147608 - protein, 10 aa, Homo Sapiens
HIDPKTGVAV

SEQ ID NO: 147609 - protein, 10 aa, Homo Sapiens
HIDPNVDYQF

SEQ ID NO: 147610 - protein, 10 aa, Homo Sapiens
HLDLPSNNNL

SEQ ID NO: 147611 - protein, 10 aa, Homo Sapiens
IADNRPSVEF

SEQ ID NO: 147612 - protein, 10 aa, Homo Sapiens
IADPKTDHRL

SEQ ID NO: 147613 - protein, 10 aa, Homo Sapiens
IADSPTGQKV

SEQ ID NO: 147614 - protein, 10 aa, Homo Sapiens
IADTGANVVV

SEQ ID NO: 147615 - protein, 10 aa, Homo Sapiens
IAEEASKVCL

SEQ ID NO: 147616 - protein, 10 aa, Homo Sapiens
IIDDPSGNSF

SEQ ID NO: 147617 - protein, 10 aa, Homo Sapiens
IIDKSGSTVF

SEQ ID NO: 147618 - protein, 10 aa, Homo Sapiens
IIDTPGHESF

SEQ ID NO: 147619 - protein, 10 aa, Homo Sapiens
IIDTPGHVDF

SEQ ID NO: 147620 - protein, 10 aa, Homo Sapiens
ILDDVSLTHL

SEQ ID NO: 147621 - protein, 10 aa, Homo Sapiens
IMDTPGHVNF

SEQ ID NO: 147622 - protein, 10 aa, Homo Sapiens
ISDGPSKVTL

SEQ ID NO: 147623 - protein, 10 aa, Homo Sapiens
IVDGRGKATI

SEQ ID NO: 147624 - protein, 10 aa, Homo Sapiens
KADAASSLTV

SEQ ID NO: 147625 - protein, 10 aa, Homo Sapiens
KADAISKSEL

SEQ ID NO: 147626 - protein, 10 aa, Homo Sapiens
KADEANDNLF

SEQ ID NO: 147627 - protein, 10 aa, Homo Sapiens
KADGIVSKNF

SEQ ID NO: 147628 - protein, 10 aa, Homo Sapiens
KADLPEGVAV

SEQ ID NO: 147629 - protein, 10 aa, Homo Sapiens
KADTISKSEL

SEQ ID NO: 147630 - protein, 10 aa, Homo Sapiens
KADTVSKTEL

SEQ ID NO: 147631 - protein, 10 aa, Homo Sapiens
KADVQSIIGL

SEQ ID NO: 147632 - protein, 10 aa, Homo Sapiens
KSDAPDTLLL

SEQ ID NO: 147633 - protein, 10 aa, Homo Sapiens
KSDDTAEHLL

SEQ ID NO: 147634 - protein, 10 aa, Homo Sapiens
KSDEGGKVLL

SEQ ID NO: 147635 - protein, 10 aa, Homo Sapiens
LIDSPGHVDF

SEQ ID NO: 147636 - protein, 10 aa, Homo Sapiens
LTDMSRPVEL

SEQ ID NO: 147637 - protein, 10 aa, Homo Sapiens
LVDGEEHVGF

SEQ ID NO: 147638 - protein, 10 aa, Homo Sapiens
NADGKLSVKF

SEQ ID NO: 147639 - protein, 10 aa, Homo Sapiens
NADGPAPLEL

SEQ ID NO: 147640 - protein, 10 aa, Homo Sapiens
NADGPNPWML

SEQ ID NO: 147641 - protein, 10 aa, Homo Sapiens
NAENPRGTFL

SEQ ID NO: 147642 - protein, 10 aa, Homo Sapiens
NAESGRGQVM

SEQ ID NO: 147643 - protein, 10 aa, Homo Sapiens
NSDDSSRNLF

SEQ ID NO: 147644 - protein, 10 aa, Homo Sapiens
PKKAKKPAAT

SEQ ID NO: 147645 - protein, 10 aa, Homo Sapiens
QADEANKRLL

SEQ ID NO: 147646 - protein, 10 aa, Homo Sapiens
RADGENTAFL

SEQ ID NO: 147647 - protein, 10 aa, Homo Sapiens
SADDKTVRLW

SEQ ID NO: 147648 - protein, 10 aa, Homo Sapiens
SADEGQTVFY

SEQ ID NO: 147649 - protein, 10 aa, Homo Sapiens
SADEPMTTFV

SEQ ID NO: 147650 - protein, 10 aa, Homo Sapiens
SADEPMTTFY

SEQ ID NO: 147651 - protein, 10 aa, Homo Sapiens
SADESGQIFI

SEQ ID NO: 147652 - protein, 10 aa, Homo Sapiens
SLDEPSVKTM

SEQ ID NO: 147653 - protein, 10 aa, Homo Sapiens
TADDPSLSLI

SEQ ID NO: 147654 - protein, 10 aa, Homo Sapiens
TADGGHYYSF

SEQ ID NO: 147655 - protein, 10 aa, Homo Sapiens
TADPPDGIKV

SEQ ID NO: 147656 - protein, 10 aa, Homo Sapiens
TAEDPSKSYV

SEQ ID NO: 147657 - protein, 10 aa, Homo Sapiens
TIDGPSKVKM

SEQ ID NO: 147658 - protein, 10 aa, Homo Sapiens
TTDNNPPMKL

SEQ ID NO: 147659 - protein, 10 aa, Homo Sapiens
TVDDPYATFV

SEQ ID NO: 147660 - protein, 10 aa, Homo Sapiens
TVEEQRPPEL

SEQ ID NO: 147661 - protein, 10 aa, Homo Sapiens
VADDIMDSSL

SEQ ID NO: 147662 - protein, 10 aa, Homo Sapiens
VADDYQPVRL

SEQ ID NO: 147663 - protein, 10 aa, Homo Sapiens
VADKHRPLEM

SEQ ID NO: 147664 - protein, 10 aa, Homo Sapiens
VADKTGSITI

SEQ ID NO: 147665 - protein, 10 aa, Homo Sapiens
VADPDNPLVL

SEQ ID NO: 147666 - protein, 10 aa, Homo Sapiens
VAEDGSRVYV

SEQ ID NO: 147667 - protein, 10 aa, Homo Sapiens
VIDDSNEHML

SEQ ID NO: 147668 - protein, 10 aa, Homo Sapiens
VIDRPNGTKV

SEQ ID NO: 147669 - protein, 10 aa, Homo Sapiens
VLSAADKGNV

SEQ ID NO: 147670 - protein, 10 aa, Homo Sapiens
VTDEPVYIDL

SEQ ID NO: 147671 - protein, 10 aa, Homo Sapiens
VVDDSNEHML

SEQ ID NO: 147672 - protein, 10 aa, Homo Sapiens
VVDGKERTLL

SEQ ID NO: 147673 - protein, 10 aa, Homo Sapiens
YADASGRNTL

SEQ ID NO: 147674 - protein, 10 aa, Homo Sapiens
YADPGAEVKI

SEQ ID NO: 147675 - protein, 10 aa, Homo Sapiens
YADQHSVQVF

SEQ ID NO: 147676 - protein, 10 aa, Homo Sapiens
YLDGHLITTV

SEQ ID NO: 147677 - protein, 10 aa, Homo Sapiens
YTDVTPRQFF

SEQ ID NO: 147678 - protein, 10 aa, Homo Sapiens
YTEDSPGLKV

SEQ ID NO: 147679 - protein, 10 aa, Homo Sapiens
YVDDTQFLRF

SEQ ID NO: 147680 - protein, 10 aa, Homo Sapiens
YVDDTQFVRF

SEQ ID NO: 147681 - protein, 10 aa, Homo Sapiens
YVDEAGTVKL

SEQ ID NO: 147682 - protein, 10 aa, Homo Sapiens
YVDEASKKEI

SEQ ID NO: 147683 - protein, 10 aa, Homo Sapiens
YVDGPASTAF

SEQ ID NO: 147684 - protein, 11 aa, Homo Sapiens
AACDPRHGRYL

SEQ ID NO: 147685 - protein, 11 aa, Homo Sapiens
AADDPLVHESL

SEQ ID NO: 147686 - protein, 11 aa, Homo Sapiens
AVEAKKTYVRD

SEQ ID NO: 147687 - protein, 11 aa, Homo Sapiens
FADDPCSSVKR

SEQ ID NO: 147688 - protein, 11 aa, Homo Sapiens
FADECPKPELL

SEQ ID NO: 147689 - protein, 11 aa, Homo Sapiens
FADFVEGSSHL

SEQ ID NO: 147690 - protein, 11 aa, Homo Sapiens
FADGERKVEHL

SEQ ID NO: 147691 - protein, 11 aa, Homo Sapiens
FADGSIRTSEL

SEQ ID NO: 147692 - protein, 11 aa, Homo Sapiens
FSDDPNVTKTL

SEQ ID NO: 147693 - protein, 11 aa, Homo Sapiens
IADLSNIINKL

SEQ ID NO: 147694 - protein, 11 aa, Homo Sapiens
ISDDSRTASQL

SEQ ID NO: 147695 - protein, 11 aa, Homo Sapiens
KADGQGSTTML

SEQ ID NO: 147696 - protein, 11 aa, Homo Sapiens
KADQVDTQQLM

SEQ ID NO: 147697 - protein, 11 aa, Homo Sapiens
LVEALKRKQQC

SEQ ID NO: 147698 - protein, 11 aa, Homo Sapiens
PKFEVIEKPQA

SEQ ID NO: 147699 - protein, 11 aa, Homo Sapiens
RADEDARMIHM

SEQ ID NO: 147700 - protein, 11 aa, Homo Sapiens
SGPSIVHRKCF

SEQ ID NO: 147701 - protein, 11 aa, Homo Sapiens
VADNLDQATRV

SEQ ID NO: 147702 - protein, 11 aa, Homo Sapiens
VGDGGTGKTTF

SEQ ID NO: 147703 - protein, 11 aa, Homo Sapiens
VIDQGETDVYV

SEQ ID NO: 147704 - protein, 11 aa, Homo Sapiens
VLSAADKGNVK

SEQ ID NO: 147705 - protein, 11 aa, Homo Sapiens
VVDLGKTSSTV

SEQ ID NO: 147706 - protein, 11 aa, Homo Sapiens
VVSEVDIAKAD

SEQ ID NO: 147707 - protein, 11 aa, Homo Sapiens
YADGEAKVEQL

SEQ ID NO: 147708 - protein, 11 aa, Homo Sapiens
YTDVGEKGSQL

SEQ ID NO: 147709 - protein, 8 aa, Homo Sapiens
ALGHVRYV

SEQ ID NO: 147710 - protein, 8 aa, Homo Sapiens
ALGPIREL

SEQ ID NO: 147711 - protein, 8 aa, Homo Sapiens
ARGPIQIL

SEQ ID NO: 147712 - protein, 8 aa, Homo Sapiens
ASGLIHRV

SEQ ID NO: 147713 - protein, 8 aa, Homo Sapiens
AVFVNVRV

SEQ ID NO: 147714 - protein, 8 aa, Homo Sapiens
AYGLSREV

SEQ ID NO: 147715 - protein, 8 aa, Homo Sapiens
EIFLRELI

SEQ ID NO: 147716 - protein, 8 aa, Homo Sapiens
EQGPLRLI

SEQ ID NO: 147717 - protein, 8 aa, Homo Sapiens
EVGPLRLV

SEQ ID NO: 147718 - protein, 8 aa, Homo Sapiens
FAMPHSIM

SEQ ID NO: 147719 - protein, 8 aa, Homo Sapiens
FGGLTRAL

SEQ ID NO: 147720 - protein, 8 aa, Homo Sapiens
FQGDIRLL

SEQ ID NO: 147721 - protein, 8 aa, Homo Sapiens
FRAPSRIF

SEQ ID NO: 147722 - protein, 8 aa, Homo Sapiens
FSFVRPKL

SEQ ID NO: 147723 - protein, 8 aa, Homo Sapiens
FSGVIRLL

SEQ ID NO: 147724 - protein, 8 aa, Homo Sapiens
FSPVGSVL

SEQ ID NO: 147725 - protein, 8 aa, Homo Sapiens
FVGPSRYL

SEQ ID NO: 147726 - protein, 8 aa, Homo Sapiens
FVNVVPTF

SEQ ID NO: 147727 - protein, 8 aa, Homo Sapiens
FVPVANEL

SEQ ID NO: 147728 - protein, 8 aa, Homo Sapiens
FYGIIRNV

SEQ ID NO: 147729 - protein, 8 aa, Homo Sapiens
FYKDGRIV

SEQ ID NO: 147730 - protein, 8 aa, Homo Sapiens
GGLRAELL

SEQ ID NO: 147731 - protein, 8 aa, Homo Sapiens
GVGPIRDV

SEQ ID NO: 147732 - protein, 8 aa, Homo Sapiens
GVGPIRKV

SEQ ID NO: 147733 - protein, 8 aa, Homo Sapiens
HSGPIHVL

SEQ ID NO: 147734 - protein, 8 aa, Homo Sapiens
IIHLHSQL

SEQ ID NO: 147735 - protein, 8 aa, Homo Sapiens
IRFKIQRL

SEQ ID NO: 147736 - protein, 8 aa, Homo Sapiens
IRGVINQL

SEQ ID NO: 147737 - protein, 8 aa, Homo Sapiens
ITGPWRSL

SEQ ID NO: 147738 - protein, 8 aa, Homo Sapiens
KYGPIRQI

SEQ ID NO: 147739 - protein, 8 aa, Homo Sapiens
LRGPVLRL

SEQ ID NO: 147740 - protein, 8 aa, Homo Sapiens
LRTERLKI

SEQ ID NO: 147741 - protein, 8 aa, Homo Sapiens
MVQIHSIL

SEQ ID NO: 147742 - protein, 8 aa, Homo Sapiens
NIGPTRIL

SEQ ID NO: 147743 - protein, 8 aa, Homo Sapiens
NVGLIRKL

SEQ ID NO: 147744 - protein, 8 aa, Homo Sapiens
QFTGIKKY

SEQ ID NO: 147745 - protein, 8 aa, Homo Sapiens
QIGPLRSL

SEQ ID NO: 147746 - protein, 8 aa, Homo Sapiens
QILVGVNK

SEQ ID NO: 147747 - protein, 8 aa, Homo Sapiens
QQGPLRSI

SEQ ID NO: 147748 - protein, 8 aa, Homo Sapiens
RIPKIQKL

SEQ ID NO: 147749 - protein, 8 aa, Homo Sapiens
RPEHVLRL

SEQ ID NO: 147750 - protein, 8 aa, Homo Sapiens
RQAFIRKV

SEQ ID NO: 147751 - protein, 8 aa, Homo Sapiens
RQGLIRVL

SEQ ID NO: 147752 - protein, 8 aa, Homo Sapiens
RTGLVRLL

SEQ ID NO: 147753 - protein, 8 aa, Homo Sapiens
SPVDIDTK

SEQ ID NO: 147754 - protein, 8 aa, Homo Sapiens
SRYTEQFL

SEQ ID NO: 147755 - protein, 8 aa, Homo Sapiens
SSGPERIL

SEQ ID NO: 147756 - protein, 8 aa, Homo Sapiens
SSGPQRLV

SEQ ID NO: 147757 - protein, 8 aa, Homo Sapiens
TRFKIQQL

SEQ ID NO: 147758 - protein, 8 aa, Homo Sapiens
TRGPVVRL

SEQ ID NO: 147759 - protein, 8 aa, Homo Sapiens
TVGLIRNL

SEQ ID NO: 147760 - protein, 8 aa, Homo Sapiens
VAMVHPLL

SEQ ID NO: 147761 - protein, 8 aa, Homo Sapiens
VRFKVVKV

SEQ ID NO: 147762 - protein, 8 aa, Homo Sapiens
VRNLPQYV

SEQ ID NO: 147763 - protein, 8 aa, Homo Sapiens
YAFLHRTL

SEQ ID NO: 147764 - protein, 8 aa, Homo Sapiens
YGMPRQIL

SEQ ID NO: 147765 - protein, 8 aa, Homo Sapiens
YIAHLRQI

SEQ ID NO: 147766 - protein, 8 aa, Homo Sapiens
YIDRVRSL

SEQ ID NO: 147767 - protein, 8 aa, Homo Sapiens
YRAPEIII

SEQ ID NO: 147768 - protein, 8 aa, Homo Sapiens
YRAPEIML

SEQ ID NO: 147769 - protein, 8 aa, Homo Sapiens
YYGPLRSV

SEQ ID NO: 147770 - protein, 8 aa, Homo Sapiens
YYGPLRTV

SEQ ID NO: 147771 - protein, 9 aa, Homo Sapiens
AAAEITRKL

SEQ ID NO: 147772 - protein, 9 aa, Homo Sapiens
AAALIIHHV

SEQ ID NO: 147773 - protein, 9 aa, Homo Sapiens
AAANVVRNI

SEQ ID NO: 147774 - protein, 9 aa, Homo Sapiens
AAASLIRLV

SEQ ID NO: 147775 - protein, 9 aa, Homo Sapiens
AAFAYTVKY

SEQ ID NO: 147776 - protein, 9 aa, Homo Sapiens
AAFLLVRKL

SEQ ID NO: 147777 - protein, 9 aa, Homo Sapiens
AAFPGASLY

SEQ ID NO: 147778 - protein, 9 aa, Homo Sapiens
AAFPRLRTI

SEQ ID NO: 147779 - protein, 9 aa, Homo Sapiens
AAFREPRLL

SEQ ID NO: 147780 - protein, 9 aa, Homo Sapiens
AAGPIRVVL

SEQ ID NO: 147781 - protein, 9 aa, Homo Sapiens
AAIGLVIYY

SEQ ID NO: 147782 - protein, 9 aa, Homo Sapiens
AAIKIIRQL

SEQ ID NO: 147783 - protein, 9 aa, Homo Sapiens
AAKDLISKL

SEQ ID NO: 147784 - protein, 9 aa, Homo Sapiens
AALGPIREL

SEQ ID NO: 147785 - protein, 9 aa, Homo Sapiens
AAMSLLRRV

SEQ ID NO: 147786 - protein, 9 aa, Homo Sapiens
AASPIITLV

SEQ ID NO: 147787 - protein, 9 aa, Homo Sapiens
AASSIQRVL

SEQ ID NO: 147788 - protein, 9 aa, Homo Sapiens
AAYFTHSNL

SEQ ID NO: 147789 - protein, 9 aa, Homo Sapiens
AAYGYGIRY

SEQ ID NO: 147790 - protein, 9 aa, Homo Sapiens
AAYQSVRIL

SEQ ID NO: 147791 - protein, 9 aa, Homo Sapiens
AAYTEIRAL

SEQ ID NO: 147792 - protein, 9 aa, Homo Sapiens
AAYYLPRHL

SEQ ID NO: 147793 - protein, 9 aa, Homo Sapiens
AERTLGNIL

SEQ ID NO: 147794 - protein, 9 aa, Homo Sapiens
AGSSVLREL

SEQ ID NO: 147795 - protein, 9 aa, Homo Sapiens
AGYNRVRIV

SEQ ID NO: 147796 - protein, 9 aa, Homo Sapiens
AGYPHIRYI

SEQ ID NO: 147797 - protein, 9 aa, Homo Sapiens
AIPAFISLL

SEQ ID NO: 147798 - protein, 9 aa, Homo Sapiens
AIVDFVRWL

SEQ ID NO: 147799 - protein, 9 aa, Homo Sapiens
AKIKWVISV

SEQ ID NO: 147800 - protein, 9 aa, Homo Sapiens
AKPPVVQHF

SEQ ID NO: 147801 - protein, 9 aa, Homo Sapiens
AKVDHVQMI

SEQ ID NO: 147802 - protein, 9 aa, Homo Sapiens
ALPDLTKVI

SEQ ID NO: 147803 - protein, 9 aa, Homo Sapiens
ALPLLVRVI

SEQ ID NO: 147804 - protein, 9 aa, Homo Sapiens
ALPPKPRFL

SEQ ID NO: 147805 - protein, 9 aa, Homo Sapiens
ALRRLLLLL

SEQ ID NO: 147806 - protein, 9 aa, Homo Sapiens
ALYPNVVQV

SEQ ID NO: 147807 - protein, 9 aa, Homo Sapiens
AMAPIKVRL

SEQ ID NO: 147808 - protein, 9 aa, Homo Sapiens
AMAPLVRKI

SEQ ID NO: 147809 - protein, 9 aa, Homo Sapiens
AMASIINRL

SEQ ID NO: 147810 - protein, 9 aa, Homo Sapiens
AQFEHTILL

SEQ ID NO: 147811 - protein, 9 aa, Homo Sapiens
ARADFQKVL

SEQ ID NO: 147812 - protein, 9 aa, Homo Sapiens
ARAELEMRL

SEQ ID NO: 147813 - protein, 9 aa, Homo Sapiens
ARAFFPNMV

SEQ ID NO: 147814 - protein, 9 aa, Homo Sapiens
ARAFIILSV

SEQ ID NO: 147815 - protein, 9 aa, Homo Sapiens
ARAPISNYI

SEQ ID NO: 147816 - protein, 9 aa, Homo Sapiens
ARAWALFWL

SEQ ID NO: 147817 - protein, 9 aa, Homo Sapiens
ARAYEPQEL

SEQ ID NO: 147818 - protein, 9 aa, Homo Sapiens
ARFEREQLL

SEQ ID NO: 147819 - protein, 9 aa, Homo Sapiens
ARFGLIQSM

SEQ ID NO: 147820 - protein, 9 aa, Homo Sapiens
ARFGSVNEL

SEQ ID NO: 147821 - protein, 9 aa, Homo Sapiens
ARFNDLRFV

SEQ ID NO: 147822 - protein, 9 aa, Homo Sapiens
ARFPGNLLL

SEQ ID NO: 147823 - protein, 9 aa, Homo Sapiens
ARFPMPRYI

SEQ ID NO: 147824 - protein, 9 aa, Homo Sapiens
ARFSGNLLV

SEQ ID NO: 147825 - protein, 9 aa, Homo Sapiens
ARFYAVQKL

SEQ ID NO: 147826 - protein, 9 aa, Homo Sapiens
ARFYLPILV

SEQ ID NO: 147827 - protein, 9 aa, Homo Sapiens
ARHSLLQTL

SEQ ID NO: 147828 - protein, 9 aa, Homo Sapiens
ARIGGVRML

SEQ ID NO: 147829 - protein, 9 aa, Homo Sapiens
ARKDNVIRL

SEQ ID NO: 147830 - protein, 9 aa, Homo Sapiens
ARKEIADYL

SEQ ID NO: 147831 - protein, 9 aa, Homo Sapiens
ARLDLERKV

SEQ ID NO: 147832 - protein, 9 aa, Homo Sapiens
ARLQTALLV

SEQ ID NO: 147833 - protein, 9 aa, Homo Sapiens
ARNDYLLTL

SEQ ID NO: 147834 - protein, 9 aa, Homo Sapiens
ARNFYENLI

SEQ ID NO: 147835 - protein, 9 aa, Homo Sapiens
ARNTVTQVL

SEQ ID NO: 147836 - protein, 9 aa, Homo Sapiens
ARPGFEQAI

SEQ ID NO: 147837 - protein, 9 aa, Homo Sapiens
ARPGLGQYL

SEQ ID NO: 147838 - protein, 9 aa, Homo Sapiens
ARPHFMSQF

SEQ ID NO: 147839 - protein, 9 aa, Homo Sapiens
ARPMRAIFL

SEQ ID NO: 147840 - protein, 9 aa, Homo Sapiens
ARPPFVICV

SEQ ID NO: 147841 - protein, 9 aa, Homo Sapiens
ARQSIIRKV

SEQ ID NO: 147842 - protein, 9 aa, Homo Sapiens
ARSELYLRF

SEQ ID NO: 147843 - protein, 9 aa, Homo Sapiens
ARTDIVSWF

SEQ ID NO: 147844 - protein, 9 aa, Homo Sapiens
ARVERVIVV

SEQ ID NO: 147845 - protein, 9 aa, Homo Sapiens
ARVPHSLDL

SEQ ID NO: 147846 - protein, 9 aa, Homo Sapiens
ARWQQVWLL

SEQ ID NO: 147847 - protein, 9 aa, Homo Sapiens
ARYGHELLI

SEQ ID NO: 147848 - protein, 9 aa, Homo Sapiens
ARYHLVQQL

SEQ ID NO: 147849 - protein, 9 aa, Homo Sapiens
ARYLTVPEI

SEQ ID NO: 147850 - protein, 9 aa, Homo Sapiens
ARYNFIRSM

SEQ ID NO: 147851 - protein, 9 aa, Homo Sapiens
ARYPDTIAL

SEQ ID NO: 147852 - protein, 9 aa, Homo Sapiens
ARYPNGVVV

SEQ ID NO: 147853 - protein, 9 aa, Homo Sapiens
ASGPIRPIV

SEQ ID NO: 147854 - protein, 9 aa, Homo Sapiens
ASLDWPRMV

SEQ ID NO: 147855 - protein, 9 aa, Homo Sapiens
ASSPVLRQM

SEQ ID NO: 147856 - protein, 9 aa, Homo Sapiens
ATIDGVRFL

SEQ ID NO: 147857 - protein, 9 aa, Homo Sapiens
ATSFILRAV

SEQ ID NO: 147858 - protein, 9 aa, Homo Sapiens
AVKDLVVLL

SEQ ID NO: 147859 - protein, 9 aa, Homo Sapiens
AVNPLLRVI

SEQ ID NO: 147860 - protein, 9 aa, Homo Sapiens
AVSWVLRSV

SEQ ID NO: 147861 - protein, 9 aa, Homo Sapiens
AYSDIVKMI

SEQ ID NO: 147862 - protein, 9 aa, Homo Sapiens
AYVQLIRSL

SEQ ID NO: 147863 - protein, 9 aa, Homo Sapiens
CGSVLVRLI

SEQ ID NO: 147864 - protein, 9 aa, Homo Sapiens
CKPHFQQLF

SEQ ID NO: 147865 - protein, 9 aa, Homo Sapiens
CQYPGLQWV

SEQ ID NO: 147866 - protein, 9 aa, Homo Sapiens
CRFQIVQVL

SEQ ID NO: 147867 - protein, 9 aa, Homo Sapiens
CRMEIIHEI

SEQ ID NO: 147868 - protein, 9 aa, Homo Sapiens
CSRYLYTLV

SEQ ID NO: 147869 - protein, 9 aa, Homo Sapiens
DRYFRIQEV

SEQ ID NO: 147870 - protein, 9 aa, Homo Sapiens
DYFEFPREL

SEQ ID NO: 147871 - protein, 9 aa, Homo Sapiens
DYSPLIRVI

SEQ ID NO: 147872 - protein, 9 aa, Homo Sapiens
EAAQILRLL

SEQ ID NO: 147873 - protein, 9 aa, Homo Sapiens
EGYPFPREV

SEQ ID NO: 147874 - protein, 9 aa, Homo Sapiens
EKPDIFQLV

SEQ ID NO: 147875 - protein, 9 aa, Homo Sapiens
ERADLIAYL

SEQ ID NO: 147876 - protein, 9 aa, Homo Sapiens
ERAGVVREL

SEQ ID NO: 147877 - protein, 9 aa, Homo Sapiens
ERAYILNLV

SEQ ID NO: 147878 - protein, 9 aa, Homo Sapiens
ERFNVPVSL

SEQ ID NO: 147879 - protein, 9 aa, Homo Sapiens
ERFPYPFQV

SEQ ID NO: 147880 - protein, 9 aa, Homo Sapiens
ERIPKALEV

SEQ ID NO: 147881 - protein, 9 aa, Homo Sapiens
ERIPKTIEI

SEQ ID NO: 147882 - protein, 9 aa, Homo Sapiens
ERPLFPQIL

SEQ ID NO: 147883 - protein, 9 aa, Homo Sapiens
ERPTFKILL

SEQ ID NO: 147884 - protein, 9 aa, Homo Sapiens
ERSGVIREV

SEQ ID NO: 147885 - protein, 9 aa, Homo Sapiens
ERVPFILTY

SEQ ID NO: 147886 - protein, 9 aa, Homo Sapiens
ERYAKIVEI

SEQ ID NO: 147887 - protein, 9 aa, Homo Sapiens
EYIKFLRSI

SEQ ID NO: 147888 - protein, 9 aa, Homo Sapiens
EYLNFIRGV

SEQ ID NO: 147889 - protein, 9 aa, Homo Sapiens
FAADIISVL

SEQ ID NO: 147890 - protein, 9 aa, Homo Sapiens
FAFFDPVMY

SEQ ID NO: 147891 - protein, 9 aa, Homo Sapiens
FAFPGEILM

SEQ ID NO: 147892 - protein, 9 aa, Homo Sapiens
FAGDLVRNL

SEQ ID NO: 147893 - protein, 9 aa, Homo Sapiens
FAGLVPRLL

SEQ ID NO: 147894 - protein, 9 aa, Homo Sapiens
FAKDFMTYL

SEQ ID NO: 147895 - protein, 9 aa, Homo Sapiens
FAKPFLASL

SEQ ID NO: 147896 - protein, 9 aa, Homo Sapiens
FAKVHILYV

SEQ ID NO: 147897 - protein, 9 aa, Homo Sapiens
FALPFGRTA

SEQ ID NO: 147898 - protein, 9 aa, Homo Sapiens
FALPYIRDV

SEQ ID NO: 147899 - protein, 9 aa, Homo Sapiens
FAMEFVKYY

SEQ ID NO: 147900 - protein, 9 aa, Homo Sapiens
FASGLIHRV

SEQ ID NO: 147901 - protein, 9 aa, Homo Sapiens
FASPMKSVV

SEQ ID NO: 147902 - protein, 9 aa, Homo Sapiens
FASTILHLV

SEQ ID NO: 147903 - protein, 9 aa, Homo Sapiens
FAYEGPMYL

SEQ ID NO: 147904 - protein, 9 aa, Homo Sapiens
FAYPAIRYL

SEQ ID NO: 147905 - protein, 9 aa, Homo Sapiens
FAYPAPLEV

SEQ ID NO: 147906 - protein, 9 aa, Homo Sapiens
FFPDFIWTV

SEQ ID NO: 147907 - protein, 9 aa, Homo Sapiens
FFSANPKEL

SEQ ID NO: 147908 - protein, 9 aa, Homo Sapiens
FFSEYEKLL

SEQ ID NO: 147909 - protein, 9 aa, Homo Sapiens
FGFHKPKMY

SEQ ID NO: 147910 - protein, 9 aa, Homo Sapiens
FGSAVPRNV

SEQ ID NO: 147911 - protein, 9 aa, Homo Sapiens
FGVDRAILY

SEQ ID NO: 147912 - protein, 9 aa, Homo Sapiens
FGVPLIVHV

SEQ ID NO: 147913 - protein, 9 aa, Homo Sapiens
FGYPDPTYL

SEQ ID NO: 147914 - protein, 9 aa, Homo Sapiens
FHIDFGHFL

SEQ ID NO: 147915 - protein, 9 aa, Homo Sapiens
FHPTMPLIV

SEQ ID NO: 147916 - protein, 9 aa, Homo Sapiens
FHYPGVQNL

SEQ ID NO: 147917 - protein, 9 aa, Homo Sapiens
FIKSFLVFI

SEQ ID NO: 147918 - protein, 9 aa, Homo Sapiens
FKFIIPQIV

SEQ ID NO: 147919 - protein, 9 aa, Homo Sapiens
FKFPGRQKI

SEQ ID NO: 147920 - protein, 9 aa, Homo Sapiens
FKMTIPLLV

SEQ ID NO: 147921 - protein, 9 aa, Homo Sapiens
FKPAMPRSV

SEQ ID NO: 147922 - protein, 9 aa, Homo Sapiens
FKPDDPNLL

SEQ ID NO: 147923 - protein, 9 aa, Homo Sapiens
FKPPVLVFV

SEQ ID NO: 147924 - protein, 9 aa, Homo Sapiens
FKPTRIIFY

SEQ ID NO: 147925 - protein, 9 aa, Homo Sapiens
FKSHLIRLI

SEQ ID NO: 147926 - protein, 9 aa, Homo Sapiens
FKYDGEIRV

SEQ ID NO: 147927 - protein, 9 aa, Homo Sapiens
FLADIVQKL

SEQ ID NO: 147928 - protein, 9 aa, Homo Sapiens
FLFDHLLTL

SEQ ID NO: 147929 - protein, 9 aa, Homo Sapiens
FLFGYPKRL

SEQ ID NO: 147930 - protein, 9 aa, Homo Sapiens
FLFPHSVLV

SEQ ID NO: 147931 - protein, 9 aa, Homo Sapiens
FLFQEPRSI

SEQ ID NO: 147932 - protein, 9 aa, Homo Sapiens
FLFQGFRLV

SEQ ID NO: 147933 - protein, 9 aa, Homo Sapiens
FLIPFVITV

SEQ ID NO: 147934 - protein, 9 aa, Homo Sapiens
FLIPLVRTL

SEQ ID NO: 147935 - protein, 9 aa, Homo Sapiens
FLLEHIRIL

SEQ ID NO: 147936 - protein, 9 aa, Homo Sapiens
FLPAFVKKM

SEQ ID NO: 147937 - protein, 9 aa, Homo Sapiens
FLPDHPIVL

SEQ ID NO: 147938 - protein, 9 aa, Homo Sapiens
FLPITPHYV

SEQ ID NO: 147939 - protein, 9 aa, Homo Sapiens
FLPLFDRVL

SEQ ID NO: 147940 - protein, 9 aa, Homo Sapiens
FLPNFVKML

SEQ ID NO: 147941 - protein, 9 aa, Homo Sapiens
FLYPFPLAL

SEQ ID NO: 147942 - protein, 9 aa, Homo Sapiens
FMADLERVL

SEQ ID NO: 147943 - protein, 9 aa, Homo Sapiens
FQAEIAQLM

SEQ ID NO: 147944 - protein, 9 aa, Homo Sapiens
FQFQNLRQL

SEQ ID NO: 147945 - protein, 9 aa, Homo Sapiens
FQIGKMRYV

SEQ ID NO: 147946 - protein, 9 aa, Homo Sapiens
FQIVNPHLL

SEQ ID NO: 147947 - protein, 9 aa, Homo Sapiens
FQKERAIFL

SEQ ID NO: 147948 - protein, 9 aa, Homo Sapiens
FQKIQVRLV

SEQ ID NO: 147949 - protein, 9 aa, Homo Sapiens
FQPDLVKRI

SEQ ID NO: 147950 - protein, 9 aa, Homo Sapiens
FQPFLKKWY

SEQ ID NO: 147951 - protein, 9 aa, Homo Sapiens
FQYESKVFY

SEQ ID NO: 147952 - protein, 9 aa, Homo Sapiens
FQYPDTRYL

SEQ ID NO: 147953 - protein, 9 aa, Homo Sapiens
FRADNLNKL

SEQ ID NO: 147954 - protein, 9 aa, Homo Sapiens
FRAEINILL

SEQ ID NO: 147955 - protein, 9 aa, Homo Sapiens
FRAFLKSEF

SEQ ID NO: 147956 - protein, 9 aa, Homo Sapiens
FRAPSMKEL

SEQ ID NO: 147957 - protein, 9 aa, Homo Sapiens
FRAQRNLYI

SEQ ID NO: 147958 - protein, 9 aa, Homo Sapiens
FRASSTLKV

SEQ ID NO: 147959 - protein, 9 aa, Homo Sapiens
FREPRLLVV

SEQ ID NO: 147960 - protein, 9 aa, Homo Sapiens
FRFDGVTSM

SEQ ID NO: 147961 - protein, 9 aa, Homo Sapiens
FRFEEPVVL

SEQ ID NO: 147962 - protein, 9 aa, Homo Sapiens
FRFEMQRDL

SEQ ID NO: 147963 - protein, 9 aa, Homo Sapiens
FRFENVNGY

SEQ ID NO: 147964 - protein, 9 aa, Homo Sapiens
FRFGNPLHI

SEQ ID NO: 147965 - protein, 9 aa, Homo Sapiens
FRFIEVQTL

SEQ ID NO: 147966 - protein, 9 aa, Homo Sapiens
FRFMATNDL

SEQ ID NO: 147967 - protein, 9 aa, Homo Sapiens
FRFNHPVEV

SEQ ID NO: 147968 - protein, 9 aa, Homo Sapiens
FRFPAAVVV

SEQ ID NO: 147969 - protein, 9 aa, Homo Sapiens
FRFPETTFI

SEQ ID NO: 147970 - protein, 9 aa, Homo Sapiens
FRFPHIDLV

SEQ ID NO: 147971 - protein, 9 aa, Homo Sapiens
FRFPKDRAV

SEQ ID NO: 147972 - protein, 9 aa, Homo Sapiens
FRFPSGAEL

SEQ ID NO: 147973 - protein, 9 aa, Homo Sapiens
FRGPTVSNI

SEQ ID NO: 147974 - protein, 9 aa, Homo Sapiens
FRHENIAEL

SEQ ID NO: 147975 - protein, 9 aa, Homo Sapiens
FRHPHIIKL

SEQ ID NO: 147976 - protein, 9 aa, Homo Sapiens
FRHPVLIFI

SEQ ID NO: 147977 - protein, 9 aa, Homo Sapiens
FRIAFEQQL

SEQ ID NO: 147978 - protein, 9 aa, Homo Sapiens
FRIEGVKSV

SEQ ID NO: 147979 - protein, 9 aa, Homo Sapiens
FRIEYEPLV

SEQ ID NO: 147980 - protein, 9 aa, Homo Sapiens
FRINEANQL

SEQ ID NO: 147981 - protein, 9 aa, Homo Sapiens
FRKDFISRI

SEQ ID NO: 147982 - protein, 9 aa, Homo Sapiens
FRKEFQPFL

SEQ ID NO: 147983 - protein, 9 aa, Homo Sapiens
FRKEFYEVV

SEQ ID NO: 147984 - protein, 9 aa, Homo Sapiens
FRKPGEKTF

SEQ ID NO: 147985 - protein, 9 aa, Homo Sapiens
FRLDTPLYF

SEQ ID NO: 147986 - protein, 9 aa, Homo Sapiens
FRMINEQQV

SEQ ID NO: 147987 - protein, 9 aa, Homo Sapiens
FRMPIINNL

SEQ ID NO: 147988 - protein, 9 aa, Homo Sapiens
FRMPVLREY

SEQ ID NO: 147989 - protein, 9 aa, Homo Sapiens
FRNDFLELL

SEQ ID NO: 147990 - protein, 9 aa, Homo Sapiens
FRNEFQNLL

SEQ ID NO: 147991 - protein, 9 aa, Homo Sapiens
FRNFFSNMF

SEQ ID NO: 147992 - protein, 9 aa, Homo Sapiens
FRNGLGNQL

SEQ ID NO: 147993 - protein, 9 aa, Homo Sapiens
FRNNRFPNL

SEQ ID NO: 147994 - protein, 9 aa, Homo Sapiens
FRNPKTSFY

SEQ ID NO: 147995 - protein, 9 aa, Homo Sapiens
FRNPLAPAV

SEQ ID NO: 147996 - protein, 9 aa, Homo Sapiens
FRPDLIEMV

SEQ ID NO: 147997 - protein, 9 aa, Homo Sapiens
FRPEHVSRL

SEQ ID NO: 147998 - protein, 9 aa, Homo Sapiens
FRPEKVLQI

SEQ ID NO: 147999 - protein, 9 aa, Homo Sapiens
FRPELKVLV

SEQ ID NO: 148000 - protein, 9 aa, Homo Sapiens
FRPEWTQRY

SEQ ID NO: 148001 - protein, 9 aa, Homo Sapiens
FRPLYTHEY

SEQ ID NO: 148002 - protein, 9 aa, Homo Sapiens
FRPPGTSDL

SEQ ID NO: 148003 - protein, 9 aa, Homo Sapiens
FRPPITQEI

SEQ ID NO: 148004 - protein, 9 aa, Homo Sapiens
FRPPKEVHL

SEQ ID NO: 148005 - protein, 9 aa, Homo Sapiens
FRPQRPQSL

SEQ ID NO: 148006 - protein, 9 aa, Homo Sapiens
FRPTFENLI

SEQ ID NO: 148007 - protein, 9 aa, Homo Sapiens
FRQEKAVWI

SEQ ID NO: 148008 - protein, 9 aa, Homo Sapiens
FRQGLIRVL

SEQ ID NO: 148009 - protein, 9 aa, Homo Sapiens
FRQIIAVVL

SEQ ID NO: 148010 - protein, 9 aa, Homo Sapiens
FRSAEPNAL

SEQ ID NO: 148011 - protein, 9 aa, Homo Sapiens
FRSEDIKRL

SEQ ID NO: 148012 - protein, 9 aa, Homo Sapiens
FRSEHELDV

SEQ ID NO: 148013 - protein, 9 aa, Homo Sapiens
FRSFVVSKF

SEQ ID NO: 148014 - protein, 9 aa, Homo Sapiens
FRSLLINAV

SEQ ID NO: 148015 - protein, 9 aa, Homo Sapiens
FRSPLARQL

SEQ ID NO: 148016 - protein, 9 aa, Homo Sapiens
FRSVFPLSV

SEQ ID NO: 148017 - protein, 9 aa, Homo Sapiens
FRTEKIRKL

SEQ ID NO: 148018 - protein, 9 aa, Homo Sapiens
FRTPFPLAF

SEQ ID NO: 148019 - protein, 9 aa, Homo Sapiens
FRVDYILSV

SEQ ID NO: 148020 - protein, 9 aa, Homo Sapiens
FRVEYASKV

SEQ ID NO: 148021 - protein, 9 aa, Homo Sapiens
FRYEGEWKA

SEQ ID NO: 148022 - protein, 9 aa, Homo Sapiens
FRYFSKQEL

SEQ ID NO: 148023 - protein, 9 aa, Homo Sapiens
FRYHGLSSL

SEQ ID NO: 148024 - protein, 9 aa, Homo Sapiens
FRYPFAPMY

SEQ ID NO: 148025 - protein, 9 aa, Homo Sapiens
FRYPQDYQF

SEQ ID NO: 148026 - protein, 9 aa, Homo Sapiens
FRYPTTEEL

SEQ ID NO: 148027 - protein, 9 aa, Homo Sapiens
FSATLPKLL

SEQ ID NO: 148028 - protein, 9 aa, Homo Sapiens
FSFQLPRRL

SEQ ID NO: 148029 - protein, 9 aa, Homo Sapiens
FSPFHASVL

SEQ ID NO: 148030 - protein, 9 aa, Homo Sapiens
FSQNIGRQV

SEQ ID NO: 148031 - protein, 9 aa, Homo Sapiens
FSYAFPKAV

SEQ ID NO: 148032 - protein, 9 aa, Homo Sapiens
FSYSCPKFL

SEQ ID NO: 148033 - protein, 9 aa, Homo Sapiens
FTAAFPRML

SEQ ID NO: 148034 - protein, 9 aa, Homo Sapiens
FTADFVRQL

SEQ ID NO: 148035 - protein, 9 aa, Homo Sapiens
FTHDWMVFV

SEQ ID NO: 148036 - protein, 9 aa, Homo Sapiens
FTPNNIKQV

SEQ ID NO: 148037 - protein, 9 aa, Homo Sapiens
FTSPAVKRL

SEQ ID NO: 148038 - protein, 9 aa, Homo Sapiens
FTSQVIRNL

SEQ ID NO: 148039 - protein, 9 aa, Homo Sapiens
FTTSNIRKV

SEQ ID NO: 148040 - protein, 9 aa, Homo Sapiens
FTVDQIRAI

SEQ ID NO: 148041 - protein, 9 aa, Homo Sapiens
FTVPFLRDV

SEQ ID NO: 148042 - protein, 9 aa, Homo Sapiens
FTYKGLRAL

SEQ ID NO: 148043 - protein, 9 aa, Homo Sapiens
FVADLQRVI

SEQ ID NO: 148044 - protein, 9 aa, Homo Sapiens
FVADRLRAV

SEQ ID NO: 148045 - protein, 9 aa, Homo Sapiens
FVFFLPRLI

SEQ ID NO: 148046 - protein, 9 aa, Homo Sapiens
FVFPGELLL

SEQ ID NO: 148047 - protein, 9 aa, Homo Sapiens
FVIETARQL

SEQ ID NO: 148048 - protein, 9 aa, Homo Sapiens
FVKDSIRLV

SEQ ID NO: 148049 - protein, 9 aa, Homo Sapiens
FVNPSLRVL

SEQ ID NO: 148050 - protein, 9 aa, Homo Sapiens
FVRDMIREV

SEQ ID NO: 148051 - protein, 9 aa, Homo Sapiens
FVSPLVKYL

SEQ ID NO: 148052 - protein, 9 aa, Homo Sapiens
FVTGIARYI

SEQ ID NO: 148053 - protein, 9 aa, Homo Sapiens
FVTPHPRRI

SEQ ID NO: 148054 - protein, 9 aa, Homo Sapiens
FVVDHVIKI

SEQ ID NO: 148055 - protein, 9 aa, Homo Sapiens
FVYDEVRKL

SEQ ID NO: 148056 - protein, 9 aa, Homo Sapiens
FVYPWYRDV

SEQ ID NO: 148057 - protein, 9 aa, Homo Sapiens
FYAELYHII

SEQ ID NO: 148058 - protein, 9 aa, Homo Sapiens
FYATLVRYV

SEQ ID NO: 148059 - protein, 9 aa, Homo Sapiens
FYHQLLREL

SEQ ID NO: 148060 - protein, 9 aa, Homo Sapiens
FYIDRGRQL

SEQ ID NO: 148061 - protein, 9 aa, Homo Sapiens
FYIPQRPYM

SEQ ID NO: 148062 - protein, 9 aa, Homo Sapiens
FYNERVVIM

SEQ ID NO: 148063 - protein, 9 aa, Homo Sapiens
FYNEYVREL

SEQ ID NO: 148064 - protein, 9 aa, Homo Sapiens
FYVDTVRAF

SEQ ID NO: 148065 - protein, 9 aa, Homo Sapiens
FYVGQPRFL

SEQ ID NO: 148066 - protein, 9 aa, Homo Sapiens
FYVPFAKAL

SEQ ID NO: 148067 - protein, 9 aa, Homo Sapiens
FYVPLPRHL

SEQ ID NO: 148068 - protein, 9 aa, Homo Sapiens
GAFGEVRLV

SEQ ID NO: 148069 - protein, 9 aa, Homo Sapiens
GFAGDDAPR

SEQ ID NO: 148070 - protein, 9 aa, Homo Sapiens
GQPDVVRLL

SEQ ID NO: 148071 - protein, 9 aa, Homo Sapiens
GRADALRVL

SEQ ID NO: 148072 - protein, 9 aa, Homo Sapiens
GRAFIFPSY

SEQ ID NO: 148073 - protein, 9 aa, Homo Sapiens
GRAFLFNKV

SEQ ID NO: 148074 - protein, 9 aa, Homo Sapiens
GRAYLFNSV

SEQ ID NO: 148075 - protein, 9 aa, Homo Sapiens
GRFFWIVRV

SEQ ID NO: 148076 - protein, 9 aa, Homo Sapiens
GRFPQVQAF

SEQ ID NO: 148077 - protein, 9 aa, Homo Sapiens
GRIDIKQLI

SEQ ID NO: 148078 - protein, 9 aa, Homo Sapiens
GRIDRIIYV

SEQ ID NO: 148079 - protein, 9 aa, Homo Sapiens
GRMVQVHEL

SEQ ID NO: 148080 - protein, 9 aa, Homo Sapiens
GRNPFVHEL

SEQ ID NO: 148081 - protein, 9 aa, Homo Sapiens
GRPEFVIKV

SEQ ID NO: 148082 - protein, 9 aa, Homo Sapiens
GRPERQFFV

SEQ ID NO: 148083 - protein, 9 aa, Homo Sapiens
GRPLFPHVL

SEQ ID NO: 148084 - protein, 9 aa, Homo Sapiens
GRPMNIQLV

SEQ ID NO: 148085 - protein, 9 aa, Homo Sapiens
GRPVFVIRI

SEQ ID NO: 148086 - protein, 9 aa, Homo Sapiens
GRPVYVTLI

SEQ ID NO: 148087 - protein, 9 aa, Homo Sapiens
GRSLIINHL

SEQ ID NO: 148088 - protein, 9 aa, Homo Sapiens
GRSPLIHAV

SEQ ID NO: 148089 - protein, 9 aa, Homo Sapiens
GRTEILKWY

SEQ ID NO: 148090 - protein, 9 aa, Homo Sapiens
GRTSLTNLL

SEQ ID NO: 148091 - protein, 9 aa, Homo Sapiens
GRYPEAQSV

SEQ ID NO: 148092 - protein, 9 aa, Homo Sapiens
GRYTGVRII

SEQ ID NO: 148093 - protein, 9 aa, Homo Sapiens
HAAPFQNIL

SEQ ID NO: 148094 - protein, 9 aa, Homo Sapiens
HAFLYIRQL

SEQ ID NO: 148095 - protein, 9 aa, Homo Sapiens
HAPFTATSL

SEQ ID NO: 148096 - protein, 9 aa, Homo Sapiens
HAPLTNIPL

SEQ ID NO: 148097 - protein, 9 aa, Homo Sapiens
HFPELVKII

SEQ ID NO: 148098 - protein, 9 aa, Homo Sapiens
HFPGLASEL

SEQ ID NO: 148099 - protein, 9 aa, Homo Sapiens
HGFAGVILI

SEQ ID NO: 148100 - protein, 9 aa, Homo Sapiens
HGVAQVRFV

SEQ ID NO: 148101 - protein, 9 aa, Homo Sapiens
HHIPDVITY

SEQ ID NO: 148102 - protein, 9 aa, Homo Sapiens
HLPDFVKQL

SEQ ID NO: 148103 - protein, 9 aa, Homo Sapiens
HLPSHIRIL

SEQ ID NO: 148104 - protein, 9 aa, Homo Sapiens
HLVDIVRSL

SEQ ID NO: 148105 - protein, 9 aa, Homo Sapiens
HQSGIVQLL

SEQ ID NO: 148106 - protein, 9 aa, Homo Sapiens
HRAVFPIYL

SEQ ID NO: 148107 - protein, 9 aa, Homo Sapiens
HRFQTQQLL

SEQ ID NO: 148108 - protein, 9 aa, Homo Sapiens
HRFVSVSKL

SEQ ID NO: 148109 - protein, 9 aa, Homo Sapiens
HRFYMIQSF

SEQ ID NO: 148110 - protein, 9 aa, Homo Sapiens
HRGDIVSLV

SEQ ID NO: 148111 - protein, 9 aa, Homo Sapiens
HRLPHVLLL

SEQ ID NO: 148112 - protein, 9 aa, Homo Sapiens
HRNEVTVEL

SEQ ID NO: 148113 - protein, 9 aa, Homo Sapiens
HRNPLPEYL

SEQ ID NO: 148114 - protein, 9 aa, Homo Sapiens
HRPEFSSCL

SEQ ID NO: 148115 - protein, 9 aa, Homo Sapiens
HRPELVTKL

SEQ ID NO: 148116 - protein, 9 aa, Homo Sapiens
HRPESVVLV

SEQ ID NO: 148117 - protein, 9 aa, Homo Sapiens
HRPGIVVDY

SEQ ID NO: 148118 - protein, 9 aa, Homo Sapiens
HRPVNVVNV

SEQ ID NO: 148119 - protein, 9 aa, Homo Sapiens
HRSPLVLAY

SEQ ID NO: 148120 - protein, 9 aa, Homo Sapiens
HRYEVVTEL

SEQ ID NO: 148121 - protein, 9 aa, Homo Sapiens
HRYPNQVYY

SEQ ID NO: 148122 - protein, 9 aa, Homo Sapiens
HYIDIERKL

SEQ ID NO: 148123 - protein, 9 aa, Homo Sapiens
HYIDRVRAL

SEQ ID NO: 148124 - protein, 9 aa, Homo Sapiens
HYIDVARLL

SEQ ID NO: 148125 - protein, 9 aa, Homo Sapiens
HYSEKLREL

SEQ ID NO: 148126 - protein, 9 aa, Homo Sapiens
IAFEFPVLV

SEQ ID NO: 148127 - protein, 9 aa, Homo Sapiens
IAFPTSISV

SEQ ID NO: 148128 - protein, 9 aa, Homo Sapiens
IAFSRPVKY

SEQ ID NO: 148129 - protein, 9 aa, Homo Sapiens
IAINISRNL

SEQ ID NO: 148130 - protein, 9 aa, Homo Sapiens
IAIPFLIKL

SEQ ID NO: 148131 - protein, 9 aa, Homo Sapiens
IASAIVNEL

SEQ ID NO: 148132 - protein, 9 aa, Homo Sapiens
IASTILRLI

SEQ ID NO: 148133 - protein, 9 aa, Homo Sapiens
IAVHVVRVL

SEQ ID NO: 148134 - protein, 9 aa, Homo Sapiens
IAVSIVRAL

SEQ ID NO: 148135 - protein, 9 aa, Homo Sapiens
IERVTLPYL

SEQ ID NO: 148136 - protein, 9 aa, Homo Sapiens
IFPEFLKEL

SEQ ID NO: 148137 - protein, 9 aa, Homo Sapiens
IGYGHVRAV

SEQ ID NO: 148138 - protein, 9 aa, Homo Sapiens
IHPDIFPLL

SEQ ID NO: 148139 - protein, 9 aa, Homo Sapiens
IHSPVVNEL

SEQ ID NO: 148140 - protein, 9 aa, Homo Sapiens
IHVDFPVIL

SEQ ID NO: 148141 - protein, 9 aa, Homo Sapiens
IIFEQIRFV

SEQ ID NO: 148142 - protein, 9 aa, Homo Sapiens
IIINHVISV

SEQ ID NO: 148143 - protein, 9 aa, Homo Sapiens
IITAFIRAL

SEQ ID NO: 148144 - protein, 9 aa, Homo Sapiens
IITDLLRSV

SEQ ID NO: 148145 - protein, 9 aa, Homo Sapiens
IIVDLARYV

SEQ ID NO: 148146 - protein, 9 aa, Homo Sapiens
ILAEIARIL

SEQ ID NO: 148147 - protein, 9 aa, Homo Sapiens
ILPDDPRQM

SEQ ID NO: 148148 - protein, 9 aa, Homo Sapiens
ILPGFQRTV

SEQ ID NO: 148149 - protein, 9 aa, Homo Sapiens
ILPKWLRFI

SEQ ID NO: 148150 - protein, 9 aa, Homo Sapiens
ILPQRIREL

SEQ ID NO: 148151 - protein, 9 aa, Homo Sapiens
ILPSSIKEL

SEQ ID NO: 148152 - protein, 9 aa, Homo Sapiens
ILPTLVRLL

SEQ ID NO: 148153 - protein, 9 aa, Homo Sapiens
ILPWYPKVL

SEQ ID NO: 148154 - protein, 9 aa, Homo Sapiens
ILSGVIRSV

SEQ ID NO: 148155 - protein, 9 aa, Homo Sapiens
ILTEIYRIV

SEQ ID NO: 148156 - protein, 9 aa, Homo Sapiens
IPGVRSVVL

SEQ ID NO: 148157 - protein, 9 aa, Homo Sapiens
IPSRLPLLL

SEQ ID NO: 148158 - protein, 9 aa, Homo Sapiens
IQPDNIVYV

SEQ ID NO: 148159 - protein, 9 aa, Homo Sapiens
IQYIRPVFV

SEQ ID NO: 148160 - protein, 9 aa, Homo Sapiens
IRAAWTRAL

SEQ ID NO: 148161 - protein, 9 aa, Homo Sapiens
IRADLTHLL

SEQ ID NO: 148162 - protein, 9 aa, Homo Sapiens
IRAEPLNSV

SEQ ID NO: 148163 - protein, 9 aa, Homo Sapiens
IRAERDILV

SEQ ID NO: 148164 - protein, 9 aa, Homo Sapiens
IRASALRVL

SEQ ID NO: 148165 - protein, 9 aa, Homo Sapiens
IRASLYNAV

SEQ ID NO: 148166 - protein, 9 aa, Homo Sapiens
IRDDHIRFI

SEQ ID NO: 148167 - protein, 9 aa, Homo Sapiens
IRFPDILRV

SEQ ID NO: 148168 - protein, 9 aa, Homo Sapiens
IRFPMQRNL

SEQ ID NO: 148169 - protein, 9 aa, Homo Sapiens
IRGSKIRFL

SEQ ID NO: 148170 - protein, 9 aa, Homo Sapiens
IRGSTIKYL

SEQ ID NO: 148171 - protein, 9 aa, Homo Sapiens
IRHDVIVSI

SEQ ID NO: 148172 - protein, 9 aa, Homo Sapiens
IRHPNIITL

SEQ ID NO: 148173 - protein, 9 aa, Homo Sapiens
IRIRVVQML

SEQ ID NO: 148174 - protein, 9 aa, Homo Sapiens
IRKAEIIKL

SEQ ID NO: 148175 - protein, 9 aa, Homo Sapiens
IRLEKVLLV

SEQ ID NO: 148176 - protein, 9 aa, Homo Sapiens
IRLPETIDL

SEQ ID NO: 148177 - protein, 9 aa, Homo Sapiens
IRMEHVKIV

SEQ ID NO: 148178 - protein, 9 aa, Homo Sapiens
IRNDYINWV

SEQ ID NO: 148179 - protein, 9 aa, Homo Sapiens
IRNDYYLNL

SEQ ID NO: 148180 - protein, 9 aa, Homo Sapiens
IRNILLHQL

SEQ ID NO: 148181 - protein, 9 aa, Homo Sapiens
IRNQIIREL

SEQ ID NO: 148182 - protein, 9 aa, Homo Sapiens
IRPDINVDV

SEQ ID NO: 148183 - protein, 9 aa, Homo Sapiens
IRPDIVNFV

SEQ ID NO: 148184 - protein, 9 aa, Homo Sapiens
IRPDRQTLM

SEQ ID NO: 148185 - protein, 9 aa, Homo Sapiens
IRPEHVLRL

SEQ ID NO: 148186 - protein, 9 aa, Homo Sapiens
IRPENVIIY

SEQ ID NO: 148187 - protein, 9 aa, Homo Sapiens
IRPEYAWIV

SEQ ID NO: 148188 - protein, 9 aa, Homo Sapiens
IRPGLTTVL

SEQ ID NO: 148189 - protein, 9 aa, Homo Sapiens
IRPLIVALI

SEQ ID NO: 148190 - protein, 9 aa, Homo Sapiens
IRPNIILVL

SEQ ID NO: 148191 - protein, 9 aa, Homo Sapiens
IRPQMQQIL

SEQ ID NO: 148192 - protein, 9 aa, Homo Sapiens
IRPVSASFL

SEQ ID NO: 148193 - protein, 9 aa, Homo Sapiens
IRQGKITEL

SEQ ID NO: 148194 - protein, 9 aa, Homo Sapiens
IRRDYLHYI

SEQ ID NO: 148195 - protein, 9 aa, Homo Sapiens
IRSLILNNI

SEQ ID NO: 148196 - protein, 9 aa, Homo Sapiens
IRSSYIRVL

SEQ ID NO: 148197 - protein, 9 aa, Homo Sapiens
IRSVELQLV

SEQ ID NO: 148198 - protein, 9 aa, Homo Sapiens
IRTESIRWL

SEQ ID NO: 148199 - protein, 9 aa, Homo Sapiens
IRTGLVRLL

SEQ ID NO: 148200 - protein, 9 aa, Homo Sapiens
IRVGKIITV

SEQ ID NO: 148201 - protein, 9 aa, Homo Sapiens
IRVGWEQLL

SEQ ID NO: 148202 - protein, 9 aa, Homo Sapiens
IRVPFLRQV

SEQ ID NO: 148203 - protein, 9 aa, Homo Sapiens
IRYIDNQVV

SEQ ID NO: 148204 - protein, 9 aa, Homo Sapiens
IRYPDSHQL

SEQ ID NO: 148205 - protein, 9 aa, Homo Sapiens
ISAELIRSL

SEQ ID NO: 148206 - protein, 9 aa, Homo Sapiens
ISAPLVKTL

SEQ ID NO: 148207 - protein, 9 aa, Homo Sapiens
ISFPDPKML

SEQ ID NO: 148208 - protein, 9 aa, Homo Sapiens
ISTPVIRTF

SEQ ID NO: 148209 - protein, 9 aa, Homo Sapiens
ITAEILREL

SEQ ID NO: 148210 - protein, 9 aa, Homo Sapiens
ITAGLIHWI

SEQ ID NO: 148211 - protein, 9 aa, Homo Sapiens
ITFPGIKLI

SEQ ID NO: 148212 - protein, 9 aa, Homo Sapiens
ITFPGLHEL

SEQ ID NO: 148213 - protein, 9 aa, Homo Sapiens
ITKGFPVLL

SEQ ID NO: 148214 - protein, 9 aa, Homo Sapiens
ITRSIINII

SEQ ID NO: 148215 - protein, 9 aa, Homo Sapiens
ITSASVRLV

SEQ ID NO: 148216 - protein, 9 aa, Homo Sapiens
ITTTVTRVL

SEQ ID NO: 148217 - protein, 9 aa, Homo Sapiens
ITVALPRLV

SEQ ID NO: 148218 - protein, 9 aa, Homo Sapiens
IVIDHLRSL

SEQ ID NO: 148219 - protein, 9 aa, Homo Sapiens
IVIGIIKTV

SEQ ID NO: 148220 - protein, 9 aa, Homo Sapiens
IVINHVISV

SEQ ID NO: 148221 - protein, 9 aa, Homo Sapiens
IYQSKVREL

SEQ ID NO: 148222 - protein, 9 aa, Homo Sapiens
KAAVMVHQL

SEQ ID NO: 148223 - protein, 9 aa, Homo Sapiens
KAMELIREL

SEQ ID NO: 148224 - protein, 9 aa, Homo Sapiens
KATNVVRLL

SEQ ID NO: 148225 - protein, 9 aa, Homo Sapiens
KAVDIVKQV

SEQ ID NO: 148226 - protein, 9 aa, Homo Sapiens
KAYPKRPLL

SEQ ID NO: 148227 - protein, 9 aa, Homo Sapiens
KEEVVTVET

SEQ ID NO: 148228 - protein, 9 aa, Homo Sapiens
KKINWIVQY

SEQ ID NO: 148229 - protein, 9 aa, Homo Sapiens
KKPELVISY

SEQ ID NO: 148230 - protein, 9 aa, Homo Sapiens
KKPEWVILI

SEQ ID NO: 148231 - protein, 9 aa, Homo Sapiens
KKPNFILLL

SEQ ID NO: 148232 - protein, 9 aa, Homo Sapiens
KKPNLILNV

SEQ ID NO: 148233 - protein, 9 aa, Homo Sapiens
KKYPFILEV

SEQ ID NO: 148234 - protein, 9 aa, Homo Sapiens
KLASYVKFY

SEQ ID NO: 148235 - protein, 9 aa, Homo Sapiens
KLPAFVRVV

SEQ ID NO: 148236 - protein, 9 aa, Homo Sapiens
KLPDLERLL

SEQ ID NO: 148237 - protein, 9 aa, Homo Sapiens
KLPEFSRKL

SEQ ID NO: 148238 - protein, 9 aa, Homo Sapiens
KQAEIVKRL

SEQ ID NO: 148239 - protein, 9 aa, Homo Sapiens
KQFPEVIKY

SEQ ID NO: 148240 - protein, 9 aa, Homo Sapiens
KRAAILTKL

SEQ ID NO: 148241 - protein, 9 aa, Homo Sapiens
KRAAVPRFV

SEQ ID NO: 148242 - protein, 9 aa, Homo Sapiens
KRAEEILRL

SEQ ID NO: 148243 - protein, 9 aa, Homo Sapiens
KRAITVQEI

SEQ ID NO: 148244 - protein, 9 aa, Homo Sapiens
KRFSGTVRL

SEQ ID NO: 148245 - protein, 9 aa, Homo Sapiens
KRIDIIHNL

SEQ ID NO: 148246 - protein, 9 aa, Homo Sapiens
KRNDYVHAL

SEQ ID NO: 148247 - protein, 9 aa, Homo Sapiens
KRNELVIRV

SEQ ID NO: 148248 - protein, 9 aa, Homo Sapiens
KRPEIISTV

SEQ ID NO: 148249 - protein, 9 aa, Homo Sapiens
KRPSSVKVF

SEQ ID NO: 148250 - protein, 9 aa, Homo Sapiens
KRPVIVKVL

SEQ ID NO: 148251 - protein, 9 aa, Homo Sapiens
KRSELVNWY

SEQ ID NO: 148252 - protein, 9 aa, Homo Sapiens
KRVTWIVEF

SEQ ID NO: 148253 - protein, 9 aa, Homo Sapiens
KTPDFILQV

SEQ ID NO: 148254 - protein, 9 aa, Homo Sapiens
KTYPLGRIL

SEQ ID NO: 148255 - protein, 9 aa, Homo Sapiens
KVPAFVRMI

SEQ ID NO: 148256 - protein, 9 aa, Homo Sapiens
KVPELIRTI

SEQ ID NO: 148257 - protein, 9 aa, Homo Sapiens
KVPTFVRML

SEQ ID NO: 148258 - protein, 9 aa, Homo Sapiens
KVVDVVRNL

SEQ ID NO: 148259 - protein, 9 aa, Homo Sapiens
KYIDKTIRV

SEQ ID NO: 148260 - protein, 9 aa, Homo Sapiens
KYPDIISRI

SEQ ID NO: 148261 - protein, 9 aa, Homo Sapiens
KYPLLLREI

SEQ ID NO: 148262 - protein, 9 aa, Homo Sapiens
LAAAMVRVL

SEQ ID NO: 148263 - protein, 9 aa, Homo Sapiens
LAATFIRSL

SEQ ID NO: 148264 - protein, 9 aa, Homo Sapiens
LAPLKYLAL

SEQ ID NO: 148265 - protein, 9 aa, Homo Sapiens
LASPVLRSV

SEQ ID NO: 148266 - protein, 9 aa, Homo Sapiens
LAVNLTRVL

SEQ ID NO: 148267 - protein, 9 aa, Homo Sapiens
LFVDRIIYI

SEQ ID NO: 148268 - protein, 9 aa, Homo Sapiens
LKPDLVNVI

SEQ ID NO: 148269 - protein, 9 aa, Homo Sapiens
LKPGMVVTF

SEQ ID NO: 148270 - protein, 9 aa, Homo Sapiens
LKPNLVLDI

SEQ ID NO: 148271 - protein, 9 aa, Homo Sapiens
LKPPHVILV

SEQ ID NO: 148272 - protein, 9 aa, Homo Sapiens
LKPSNILYV

SEQ ID NO: 148273 - protein, 9 aa, Homo Sapiens
LLARSPFLV

SEQ ID NO: 148274 - protein, 9 aa, Homo Sapiens
LLFMLVLTV

SEQ ID NO: 148275 - protein, 9 aa, Homo Sapiens
LLLHLPRYL

SEQ ID NO: 148276 - protein, 9 aa, Homo Sapiens
LLNPHLRQL

SEQ ID NO: 148277 - protein, 9 aa, Homo Sapiens
LLPDIISRL

SEQ ID NO: 148278 - protein, 9 aa, Homo Sapiens
LLPDIVTCV

SEQ ID NO: 148279 - protein, 9 aa, Homo Sapiens
LLPDLIQKV

SEQ ID NO: 148280 - protein, 9 aa, Homo Sapiens
LLPDNVHYV

SEQ ID NO: 148281 - protein, 9 aa, Homo Sapiens
LLPKHPHLV

SEQ ID NO: 148282 - protein, 9 aa, Homo Sapiens
LLPVITKEL

SEQ ID NO: 148283 - protein, 9 aa, Homo Sapiens
LLRTASLHL

SEQ ID NO: 148284 - protein, 9 aa, Homo Sapiens
LPINGNGKQ

SEQ ID NO: 148285 - protein, 9 aa, Homo Sapiens
LQNAQVHQL

SEQ ID NO: 148286 - protein, 9 aa, Homo Sapiens
LQPSILREV

SEQ ID NO: 148287 - protein, 9 aa, Homo Sapiens
LRAALEVHV

SEQ ID NO: 148288 - protein, 9 aa, Homo Sapiens
LRAEMVAQL

SEQ ID NO: 148289 - protein, 9 aa, Homo Sapiens
LRAGKPHLV

SEQ ID NO: 148290 - protein, 9 aa, Homo Sapiens
LRAVIVRVL

SEQ ID NO: 148291 - protein, 9 aa, Homo Sapiens
LRFDGALNV

SEQ ID NO: 148292 - protein, 9 aa, Homo Sapiens
LRFGNPLLV

SEQ ID NO: 148293 - protein, 9 aa, Homo Sapiens
LRFKKPQSL

SEQ ID NO: 148294 - protein, 9 aa, Homo Sapiens
LRFLFENKL

SEQ ID NO: 148295 - protein, 9 aa, Homo Sapiens
LRFLHENQL

SEQ ID NO: 148296 - protein, 9 aa, Homo Sapiens
LRFNKTVRV

SEQ ID NO: 148297 - protein, 9 aa, Homo Sapiens
LRFPNGVQL

SEQ ID NO: 148298 - protein, 9 aa, Homo Sapiens
LRGDFVRRL

SEQ ID NO: 148299 - protein, 9 aa, Homo Sapiens
LRGDIINEV

SEQ ID NO: 148300 - protein, 9 aa, Homo Sapiens
LRHPAIRVL

SEQ ID NO: 148301 - protein, 9 aa, Homo Sapiens
LRHPGIVNL

SEQ ID NO: 148302 - protein, 9 aa, Homo Sapiens
LRHPNILRL

SEQ ID NO: 148303 - protein, 9 aa, Homo Sapiens
LRHPNIVSL

SEQ ID NO: 148304 - protein, 9 aa, Homo Sapiens
LRHVGLNEV

SEQ ID NO: 148305 - protein, 9 aa, Homo Sapiens
LRIEFEQNL

SEQ ID NO: 148306 - protein, 9 aa, Homo Sapiens
LRIEFEQTL

SEQ ID NO: 148307 - protein, 9 aa, Homo Sapiens
LRIPAVRTV

SEQ ID NO: 148308 - protein, 9 aa, Homo Sapiens
LRIYHEQQV

SEQ ID NO: 148309 - protein, 9 aa, Homo Sapiens
LRMPGVQEY

SEQ ID NO: 148310 - protein, 9 aa, Homo Sapiens
LRNPFVQVF

SEQ ID NO: 148311 - protein, 9 aa, Homo Sapiens
LRNPVLQQV

SEQ ID NO: 148312 - protein, 9 aa, Homo Sapiens
LRPEIAVYV

SEQ ID NO: 148313 - protein, 9 aa, Homo Sapiens
LRPESLHQV

SEQ ID NO: 148314 - protein, 9 aa, Homo Sapiens
LRPFFLLSV

SEQ ID NO: 148315 - protein, 9 aa, Homo Sapiens
LRPLLVKKI

SEQ ID NO: 148316 - protein, 9 aa, Homo Sapiens
LRPNFTIAM

SEQ ID NO: 148317 - protein, 9 aa, Homo Sapiens
LRPPIMIMM

SEQ ID NO: 148318 - protein, 9 aa, Homo Sapiens
LRPPQPRFL

SEQ ID NO: 148319 - protein, 9 aa, Homo Sapiens
LRPQMSQFL

SEQ ID NO: 148320 - protein, 9 aa, Homo Sapiens
LRPVFQQRF

SEQ ID NO: 148321 - protein, 9 aa, Homo Sapiens
LRRPAVVYI

SEQ ID NO: 148322 - protein, 9 aa, Homo Sapiens
LRSDIQKRL

SEQ ID NO: 148323 - protein, 9 aa, Homo Sapiens
LRSDLVLLY

SEQ ID NO: 148324 - protein, 9 aa, Homo Sapiens
LRSEILHRV

SEQ ID NO: 148325 - protein, 9 aa, Homo Sapiens
LRSGKFNVL

SEQ ID NO: 148326 - protein, 9 aa, Homo Sapiens
LRSGVIVRL

SEQ ID NO: 148327 - protein, 9 aa, Homo Sapiens
LRSGVLQRL

SEQ ID NO: 148328 - protein, 9 aa, Homo Sapiens
LRSISSNAL

SEQ ID NO: 148329 - protein, 9 aa, Homo Sapiens
LRSPSVLEV

SEQ ID NO: 148330 - protein, 9 aa, Homo Sapiens
LRSPVYLTV

SEQ ID NO: 148331 - protein, 9 aa, Homo Sapiens
LRTDFAQKL

SEQ ID NO: 148332 - protein, 9 aa, Homo Sapiens
LRVPFVVDI

SEQ ID NO: 148333 - protein, 9 aa, Homo Sapiens
LRYAAVRTL

SEQ ID NO: 148334 - protein, 9 aa, Homo Sapiens
LRYDHQQRL

SEQ ID NO: 148335 - protein, 9 aa, Homo Sapiens
LRYEIPESL

SEQ ID NO: 148336 - protein, 9 aa, Homo Sapiens
LRYGLPVNF

SEQ ID NO: 148337 - protein, 9 aa, Homo Sapiens
LRYPMAVGL

SEQ ID NO: 148338 - protein, 9 aa, Homo Sapiens
LSFMNPRLL

SEQ ID NO: 148339 - protein, 9 aa, Homo Sapiens
LSFPTTKTY

SEQ ID NO: 148340 - protein, 9 aa, Homo Sapiens
LSSSVIREL

SEQ ID NO: 148341 - protein, 9 aa, Homo Sapiens
LSTTVKREL

SEQ ID NO: 148342 - protein, 9 aa, Homo Sapiens
LTFPHPVYY

SEQ ID NO: 148343 - protein, 9 aa, Homo Sapiens
LTIDGIRYV

SEQ ID NO: 148344 - protein, 9 aa, Homo Sapiens
LTMEVIRQV

SEQ ID NO: 148345 - protein, 9 aa, Homo Sapiens
LTPAFPRSL

SEQ ID NO: 148346 - protein, 9 aa, Homo Sapiens
LTPNIVRAL

SEQ ID NO: 148347 - protein, 9 aa, Homo Sapiens
LTVPFARYL

SEQ ID NO: 148348 - protein, 9 aa, Homo Sapiens
LVIDAVREI

SEQ ID NO: 148349 - protein, 9 aa, Homo Sapiens
LVVPFAKVV

SEQ ID NO: 148350 - protein, 9 aa, Homo Sapiens
LVYDGIRDI

SEQ ID NO: 148351 - protein, 9 aa, Homo Sapiens
LYKWFTSQV

SEQ ID NO: 148352 - protein, 9 aa, Homo Sapiens
LYNGATRKL

SEQ ID NO: 148353 - protein, 9 aa, Homo Sapiens
LYPEIPRKL

SEQ ID NO: 148354 - protein, 9 aa, Homo Sapiens
LYSTMVRFL

SEQ ID NO: 148355 - protein, 9 aa, Homo Sapiens
LYTVVPRLV

SEQ ID NO: 148356 - protein, 9 aa, Homo Sapiens
MAAGLARLL

SEQ ID NO: 148357 - protein, 9 aa, Homo Sapiens
MAAGRLLEL

SEQ ID NO: 148358 - protein, 9 aa, Homo Sapiens
MAYAGARFV

SEQ ID NO: 148359 - protein, 9 aa, Homo Sapiens
MKPGKVVLV

SEQ ID NO: 148360 - protein, 9 aa, Homo Sapiens
MLPEFYKTV

SEQ ID NO: 148361 - protein, 9 aa, Homo Sapiens
MLPSILNQL

SEQ ID NO: 148362 - protein, 9 aa, Homo Sapiens
MLPTFVRSI

SEQ ID NO: 148363 - protein, 9 aa, Homo Sapiens
MMAGLLRSL

SEQ ID NO: 148364 - protein, 9 aa, Homo Sapiens
MQFSKPRKL

SEQ ID NO: 148365 - protein, 9 aa, Homo Sapiens
MQGPYRAMV

SEQ ID NO: 148366 - protein, 9 aa, Homo Sapiens
MQIELARYI

SEQ ID NO: 148367 - protein, 9 aa, Homo Sapiens
MQPTHPIRL

SEQ ID NO: 148368 - protein, 9 aa, Homo Sapiens
MRAAINQKL

SEQ ID NO: 148369 - protein, 9 aa, Homo Sapiens
MRALLARLL

SEQ ID NO: 148370 - protein, 9 aa, Homo Sapiens
MRFLAATFL

SEQ ID NO: 148371 - protein, 9 aa, Homo Sapiens
MRPDIVALL

SEQ ID NO: 148372 - protein, 9 aa, Homo Sapiens
MRPLDIVEL

SEQ ID NO: 148373 - protein, 9 aa, Homo Sapiens
MRPTLLWSL

SEQ ID NO: 148374 - protein, 9 aa, Homo Sapiens
MRSVLTQVL

SEQ ID NO: 148375 - protein, 9 aa, Homo Sapiens
MRYLHRIYV

SEQ ID NO: 148376 - protein, 9 aa, Homo Sapiens
MRYLLPSVV

SEQ ID NO: 148377 - protein, 9 aa, Homo Sapiens
MSSSVVRRL

SEQ ID NO: 148378 - protein, 9 aa, Homo Sapiens
MSVYLVRQL

SEQ ID NO: 148379 - protein, 9 aa, Homo Sapiens
MTPEIIQKL

SEQ ID NO: 148380 - protein, 9 aa, Homo Sapiens
MTSNIVQCL

SEQ ID NO: 148381 - protein, 9 aa, Homo Sapiens
MVSAIVRTM

SEQ ID NO: 148382 - protein, 9 aa, Homo Sapiens
MVYGGVRIV

SEQ ID NO: 148383 - protein, 9 aa, Homo Sapiens
MYPGLPSRL

SEQ ID NO: 148384 - protein, 9 aa, Homo Sapiens
NALGHVRYV

SEQ ID NO: 148385 - protein, 9 aa, Homo Sapiens
NAMGYVRMI

SEQ ID NO: 148386 - protein, 9 aa, Homo Sapiens
NAYTGIVLL

SEQ ID NO: 148387 - protein, 9 aa, Homo Sapiens
NGVPFVRTI

SEQ ID NO: 148388 - protein, 9 aa, Homo Sapiens
NHIGWVQEF

SEQ ID NO: 148389 - protein, 9 aa, Homo Sapiens
NHPEIVQLV

SEQ ID NO: 148390 - protein, 9 aa, Homo Sapiens
NHPNIVKLY

SEQ ID NO: 148391 - protein, 9 aa, Homo Sapiens
NHPNVIKYY

SEQ ID NO: 148392 - protein, 9 aa, Homo Sapiens
NIFVRPSLV

SEQ ID NO: 148393 - protein, 9 aa, Homo Sapiens
NKPEYIQML

SEQ ID NO: 148394 - protein, 9 aa, Homo Sapiens
NKYPQAVFL

SEQ ID NO: 148395 - protein, 9 aa, Homo Sapiens
NLPYFLRYI

SEQ ID NO: 148396 - protein, 9 aa, Homo Sapiens
NLYPFVKTV

SEQ ID NO: 148397 - protein, 9 aa, Homo Sapiens
NMASFVRQL

SEQ ID NO: 148398 - protein, 9 aa, Homo Sapiens
NQIPFIIQY

SEQ ID NO: 148399 - protein, 9 aa, Homo Sapiens
NRADLIRHF

SEQ ID NO: 148400 - protein, 9 aa, Homo Sapiens
NRADLLIWL

SEQ ID NO: 148401 - protein, 9 aa, Homo Sapiens
NRAELYQHL

SEQ ID NO: 148402 - protein, 9 aa, Homo Sapiens
NRAEYYHLL

SEQ ID NO: 148403 - protein, 9 aa, Homo Sapiens
NRFKGVKYF

SEQ ID NO: 148404 - protein, 9 aa, Homo Sapiens
NRFNYPFEL

SEQ ID NO: 148405 - protein, 9 aa, Homo Sapiens
NRFPAVNSL

SEQ ID NO: 148406 - protein, 9 aa, Homo Sapiens
NRFPWPKVL

SEQ ID NO: 148407 - protein, 9 aa, Homo Sapiens
NRFWPIIQI

SEQ ID NO: 148408 - protein, 9 aa, Homo Sapiens
NRIAYIHLV

SEQ ID NO: 148409 - protein, 9 aa, Homo Sapiens
NRIDLVKYY

SEQ ID NO: 148410 - protein, 9 aa, Homo Sapiens
NRINTIRQL

SEQ ID NO: 148411 - protein, 9 aa, Homo Sapiens
NRIPKEITV

SEQ ID NO: 148412 - protein, 9 aa, Homo Sapiens
NRLPKPVLL

SEQ ID NO: 148413 - protein, 9 aa, Homo Sapiens
NRLQWVQLV

SEQ ID NO: 148414 - protein, 9 aa, Homo Sapiens
NRMPIARKI

SEQ ID NO: 148415 - protein, 9 aa, Homo Sapiens
NRNETIQWL

SEQ ID NO: 148416 - protein, 9 aa, Homo Sapiens
NRPEFITEF

SEQ ID NO: 148417 - protein, 9 aa, Homo Sapiens
NRPKALNAL

SEQ ID NO: 148418 - protein, 9 aa, Homo Sapiens
NRPKFEQIV

SEQ ID NO: 148419 - protein, 9 aa, Homo Sapiens
NRPKFLNAL

SEQ ID NO: 148420 - protein, 9 aa, Homo Sapiens
NRPNLYYEV

SEQ ID NO: 148421 - protein, 9 aa, Homo Sapiens
NRVKIVQLL

SEQ ID NO: 148422 - protein, 9 aa, Homo Sapiens
NRVWWQILL

SEQ ID NO: 148423 - protein, 9 aa, Homo Sapiens
NRYDGIYKV

SEQ ID NO: 148424 - protein, 9 aa, Homo Sapiens
NRYHVPVVV

SEQ ID NO: 148425 - protein, 9 aa, Homo Sapiens
NRYLVVLYY

SEQ ID NO: 148426 - protein, 9 aa, Homo Sapiens
NRYPASSLV

SEQ ID NO: 148427 - protein, 9 aa, Homo Sapiens
NSFGFPQYV

SEQ ID NO: 148428 - protein, 9 aa, Homo Sapiens
NSTYIMRVL

SEQ ID NO: 148429 - protein, 9 aa, Homo Sapiens
NSYVSPRIL

SEQ ID NO: 148430 - protein, 9 aa, Homo Sapiens
NTIPFIIRY

SEQ ID NO: 148431 - protein, 9 aa, Homo Sapiens
NVFFYPRLL

SEQ ID NO: 148432 - protein, 9 aa, Homo Sapiens
NVKAFISNV

SEQ ID NO: 148433 - protein, 9 aa, Homo Sapiens
NVTPLARIV

SEQ ID NO: 148434 - protein, 9 aa, Homo Sapiens
NVVNIARYL

SEQ ID NO: 148435 - protein, 9 aa, Homo Sapiens
NYIDIVKYV

SEQ ID NO: 148436 - protein, 9 aa, Homo Sapiens
NYIDKIKVV

SEQ ID NO: 148437 - protein, 9 aa, Homo Sapiens
NYIDKVRFL

SEQ ID NO: 148438 - protein, 9 aa, Homo Sapiens
NYIEFTRIL

SEQ ID NO: 148439 - protein, 9 aa, Homo Sapiens
NYLPFIMEL

SEQ ID NO: 148440 - protein, 9 aa, Homo Sapiens
NYMNILRFL

SEQ ID NO: 148441 - protein, 9 aa, Homo Sapiens
NYRWWPAEI

SEQ ID NO: 148442 - protein, 9 aa, Homo Sapiens
NYRWWPAEV

SEQ ID NO: 148443 - protein, 9 aa, Homo Sapiens
NYVSLTRIL

SEQ ID NO: 148444 - protein, 9 aa, Homo Sapiens
PIRLLAAAA

SEQ ID NO: 148445 - protein, 9 aa, Homo Sapiens
PKREIQKIL

SEQ ID NO: 148446 - protein, 9 aa, Homo Sapiens
PYLDIVREV

SEQ ID NO: 148447 - protein, 9 aa, Homo Sapiens
QAAPNLRKL

SEQ ID NO: 148448 - protein, 9 aa, Homo Sapiens
QALPWVRYI

SEQ ID NO: 148449 - protein, 9 aa, Homo Sapiens
QAPNFSRLL

SEQ ID NO: 148450 - protein, 9 aa, Homo Sapiens
QASGKIRLL

SEQ ID NO: 148451 - protein, 9 aa, Homo Sapiens
QAYPEVRIV

SEQ ID NO: 148452 - protein, 9 aa, Homo Sapiens
QFINFPIYV

SEQ ID NO: 148453 - protein, 9 aa, Homo Sapiens
QGVGPIRKV

SEQ ID NO: 148454 - protein, 9 aa, Homo Sapiens
QHIDFAIQY

SEQ ID NO: 148455 - protein, 9 aa, Homo Sapiens
QKPNFVIIL

SEQ ID NO: 148456 - protein, 9 aa, Homo Sapiens
QKYPFPILI

SEQ ID NO: 148457 - protein, 9 aa, Homo Sapiens
QLPNFAFSV

SEQ ID NO: 148458 - protein, 9 aa, Homo Sapiens
QLPPFPREL

SEQ ID NO: 148459 - protein, 9 aa, Homo Sapiens
QMPDIMRLI

SEQ ID NO: 148460 - protein, 9 aa, Homo Sapiens
QRAAMMNLL

SEQ ID NO: 148461 - protein, 9 aa, Homo Sapiens
QRAEVVVQV

SEQ ID NO: 148462 - protein, 9 aa, Homo Sapiens
QRAHQILVL

SEQ ID NO: 148463 - protein, 9 aa, Homo Sapiens
QRALALHVL

SEQ ID NO: 148464 - protein, 9 aa, Homo Sapiens
QRALLVHDL

SEQ ID NO: 148465 - protein, 9 aa, Homo Sapiens
QRAMMANRL

SEQ ID NO: 148466 - protein, 9 aa, Homo Sapiens
QRAVAINRL

SEQ ID NO: 148467 - protein, 9 aa, Homo Sapiens
QRFLEVQYL

SEQ ID NO: 148468 - protein, 9 aa, Homo Sapiens
QRFPNALFV

SEQ ID NO: 148469 - protein, 9 aa, Homo Sapiens
QRFPPPQEL

SEQ ID NO: 148470 - protein, 9 aa, Homo Sapiens
QRGDLIRIL

SEQ ID NO: 148471 - protein, 9 aa, Homo Sapiens
QRNEFLLLL

SEQ ID NO: 148472 - protein, 9 aa, Homo Sapiens
QRNEVVVEL

SEQ ID NO: 148473 - protein, 9 aa, Homo Sapiens
QRNPEISHL

SEQ ID NO: 148474 - protein, 9 aa, Homo Sapiens
QRNQAIQAL

SEQ ID NO: 148475 - protein, 9 aa, Homo Sapiens
QRPGFVIDI

SEQ ID NO: 148476 - protein, 9 aa, Homo Sapiens
QRPPLIAAV

SEQ ID NO: 148477 - protein, 9 aa, Homo Sapiens
QRPSAIQLL

SEQ ID NO: 148478 - protein, 9 aa, Homo Sapiens
QRSEIMMFI

SEQ ID NO: 148479 - protein, 9 aa, Homo Sapiens
QRSLLLLQL

SEQ ID NO: 148480 - protein, 9 aa, Homo Sapiens
QRSLVLFSV

SEQ ID NO: 148481 - protein, 9 aa, Homo Sapiens
QRSRFIVVV

SEQ ID NO: 148482 - protein, 9 aa, Homo Sapiens
QRSYLVQYM

SEQ ID NO: 148483 - protein, 9 aa, Homo Sapiens
QRTSLIVHV

SEQ ID NO: 148484 - protein, 9 aa, Homo Sapiens
QRYPEIRFF

SEQ ID NO: 148485 - protein, 9 aa, Homo Sapiens
QRYPMPQNL

SEQ ID NO: 148486 - protein, 9 aa, Homo Sapiens
QSPAFTRQL

SEQ ID NO: 148487 - protein, 9 aa, Homo Sapiens
QSPDFVRTV

SEQ ID NO: 148488 - protein, 9 aa, Homo Sapiens
QSTDIIRYL

SEQ ID NO: 148489 - protein, 9 aa, Homo Sapiens
QTAALVRQL

SEQ ID NO: 148490 - protein, 9 aa, Homo Sapiens
QTFQHPRYL

SEQ ID NO: 148491 - protein, 9 aa, Homo Sapiens
QTHGFIIRV

SEQ ID NO: 148492 - protein, 9 aa, Homo Sapiens
QTPNFVRGL

SEQ ID NO: 148493 - protein, 9 aa, Homo Sapiens
QYPVIIHLI

SEQ ID NO: 148494 - protein, 9 aa, Homo Sapiens
QYSNNIRQL

SEQ ID NO: 148495 - protein, 9 aa, Homo Sapiens
QYTDLLRLF

SEQ ID NO: 148496 - protein, 9 aa, Homo Sapiens
QYYPNGIRL

SEQ ID NO: 148497 - protein, 9 aa, Homo Sapiens
RAFPGLRYV

SEQ ID NO: 148498 - protein, 9 aa, Homo Sapiens
RAFPLARDV

SEQ ID NO: 148499 - protein, 9 aa, Homo Sapiens
RDYSAILYL

SEQ ID NO: 148500 - protein, 9 aa, Homo Sapiens
RFPEHVREI

SEQ ID NO: 148501 - protein, 9 aa, Homo Sapiens
RGYDFPAVL

SEQ ID NO: 148502 - protein, 9 aa, Homo Sapiens
RIENRILIL

SEQ ID NO: 148503 - protein, 9 aa, Homo Sapiens
RLPDLIKEV

SEQ ID NO: 148504 - protein, 9 aa, Homo Sapiens
RLPELARVL

SEQ ID NO: 148505 - protein, 9 aa, Homo Sapiens
RLPVNVREL

SEQ ID NO: 148506 - protein, 9 aa, Homo Sapiens
RLTPKIQKL

SEQ ID NO: 148507 - protein, 9 aa, Homo Sapiens
RMPELVRQL

SEQ ID NO: 148508 - protein, 9 aa, Homo Sapiens
RQADFVQVL

SEQ ID NO: 148509 - protein, 9 aa, Homo Sapiens
RQINWTVLY

SEQ ID NO: 148510 - protein, 9 aa, Homo Sapiens
RQPDLVLRL

SEQ ID NO: 148511 - protein, 9 aa, Homo Sapiens
RRAPVVVRL

SEQ ID NO: 148512 - protein, 9 aa, Homo Sapiens
RRFPDLNRL

SEQ ID NO: 148513 - protein, 9 aa, Homo Sapiens
RRFPEQVRV

SEQ ID NO: 148514 - protein, 9 aa, Homo Sapiens
RRFPLEQRL

SEQ ID NO: 148515 - protein, 9 aa, Homo Sapiens
RRIDITAKL

SEQ ID NO: 148516 - protein, 9 aa, Homo Sapiens
RRNPDTQWI

SEQ ID NO: 148517 - protein, 9 aa, Homo Sapiens
RRPDLLTMV

SEQ ID NO: 148518 - protein, 9 aa, Homo Sapiens
RRPEFQTLL

SEQ ID NO: 148519 - protein, 9 aa, Homo Sapiens
RRPLLLNSV

SEQ ID NO: 148520 - protein, 9 aa, Homo Sapiens
RRSFIIQNI

SEQ ID NO: 148521 - protein, 9 aa, Homo Sapiens
RRSPFLQVF

SEQ ID NO: 148522 - protein, 9 aa, Homo Sapiens
RRSSIPITV

SEQ ID NO: 148523 - protein, 9 aa, Homo Sapiens
RRYEIAVNL

SEQ ID NO: 148524 - protein, 9 aa, Homo Sapiens
RRYQDAIRV

SEQ ID NO: 148525 - protein, 9 aa, Homo Sapiens
RSFPSVREL

SEQ ID NO: 148526 - protein, 9 aa, Homo Sapiens
RSVDIINML

SEQ ID NO: 148527 - protein, 9 aa, Homo Sapiens
RTTDIVIRI

SEQ ID NO: 148528 - protein, 9 aa, Homo Sapiens
RVFPYSVFY

SEQ ID NO: 148529 - protein, 9 aa, Homo Sapiens
RVIDLLRVI

SEQ ID NO: 148530 - protein, 9 aa, Homo Sapiens
RVSDILRYL

SEQ ID NO: 148531 - protein, 9 aa, Homo Sapiens
RYPDRITLI

SEQ ID NO: 148532 - protein, 9 aa, Homo Sapiens
RYYSDPRFL

SEQ ID NO: 148533 - protein, 9 aa, Homo Sapiens
SAFALVRTI

SEQ ID NO: 148534 - protein, 9 aa, Homo Sapiens
SAFGNVKLV

SEQ ID NO: 148535 - protein, 9 aa, Homo Sapiens
SAFPEVRSL

SEQ ID NO: 148536 - protein, 9 aa, Homo Sapiens
SAFPFPVTV

SEQ ID NO: 148537 - protein, 9 aa, Homo Sapiens
SAFPHLRVL

SEQ ID NO: 148538 - protein, 9 aa, Homo Sapiens
SAGPVHPLV

SEQ ID NO: 148539 - protein, 9 aa, Homo Sapiens
SAKPFMSLV

SEQ ID NO: 148540 - protein, 9 aa, Homo Sapiens
SAKSWPIFL

SEQ ID NO: 148541 - protein, 9 aa, Homo Sapiens
SALSHVRKI

SEQ ID NO: 148542 - protein, 9 aa, Homo Sapiens
SAMESHSLL

SEQ ID NO: 148543 - protein, 9 aa, Homo Sapiens
SAMVRVISV

SEQ ID NO: 148544 - protein, 9 aa, Homo Sapiens
SAPIFTTSL

SEQ ID NO: 148545 - protein, 9 aa, Homo Sapiens
SATELMNIL

SEQ ID NO: 148546 - protein, 9 aa, Homo Sapiens
SATSIMRNL

SEQ ID NO: 148547 - protein, 9 aa, Homo Sapiens
SAVDFIRTL

SEQ ID NO: 148548 - protein, 9 aa, Homo Sapiens
SAVPFLILV

SEQ ID NO: 148549 - protein, 9 aa, Homo Sapiens
SFYEHIITV

SEQ ID NO: 148550 - protein, 9 aa, Homo Sapiens
SGAGILRLV

SEQ ID NO: 148551 - protein, 9 aa, Homo Sapiens
SGAGILRMV

SEQ ID NO: 148552 - protein, 9 aa, Homo Sapiens
SGFSGVIRL

SEQ ID NO: 148553 - protein, 9 aa, Homo Sapiens
SGSQLIRLI

SEQ ID NO: 148554 - protein, 9 aa, Homo Sapiens
SGTDIVRQI

SEQ ID NO: 148555 - protein, 9 aa, Homo Sapiens
SIFPVVRIL

SEQ ID NO: 148556 - protein, 9 aa, Homo Sapiens
SIINHIRIL

SEQ ID NO: 148557 - protein, 9 aa, Homo Sapiens
SIPDFPMHL

SEQ ID NO: 148558 - protein, 9 aa, Homo Sapiens
SIRNFLIYV

SEQ ID NO: 148559 - protein, 9 aa, Homo Sapiens
SKIDFVLSV

SEQ ID NO: 148560 - protein, 9 aa, Homo Sapiens
SKPAFASLL

SEQ ID NO: 148561 - protein, 9 aa, Homo Sapiens
SKPDIISQL

SEQ ID NO: 148562 - protein, 9 aa, Homo Sapiens
SKPGIWREI

SEQ ID NO: 148563 - protein, 9 aa, Homo Sapiens
SLADIAQKL

SEQ ID NO: 148564 - protein, 9 aa, Homo Sapiens
SLANIIRQL

SEQ ID NO: 148565 - protein, 9 aa, Homo Sapiens
SLIDFLRVV

SEQ ID NO: 148566 - protein, 9 aa, Homo Sapiens
SLIEQTTAL

SEQ ID NO: 148567 - protein, 9 aa, Homo Sapiens
SLPEILKEV

SEQ ID NO: 148568 - protein, 9 aa, Homo Sapiens
SLPMLVRQL

SEQ ID NO: 148569 - protein, 9 aa, Homo Sapiens
SLPPLPRKV

SEQ ID NO: 148570 - protein, 9 aa, Homo Sapiens
SLPQLPREL

SEQ ID NO: 148571 - protein, 9 aa, Homo Sapiens
SLPSMIRKI

SEQ ID NO: 148572 - protein, 9 aa, Homo Sapiens
SLSNIVRNL

SEQ ID NO: 148573 - protein, 9 aa, Homo Sapiens
SMAEILRSL

SEQ ID NO: 148574 - protein, 9 aa, Homo Sapiens
SMKAFISKV

SEQ ID NO: 148575 - protein, 9 aa, Homo Sapiens
SNSDVIRQV

SEQ ID NO: 148576 - protein, 9 aa, Homo Sapiens
SNSELIRLI

SEQ ID NO: 148577 - protein, 9 aa, Homo Sapiens
SPVTKELLL

SEQ ID NO: 148578 - protein, 9 aa, Homo Sapiens
SQAPLLRWV

SEQ ID NO: 148579 - protein, 9 aa, Homo Sapiens
SQYPEIIFL

SEQ ID NO: 148580 - protein, 9 aa, Homo Sapiens
SQYPFPVTL

SEQ ID NO: 148581 - protein, 9 aa, Homo Sapiens
SQYPGAKYI

SEQ ID NO: 148582 - protein, 9 aa, Homo Sapiens
SQYQGVVVY

SEQ ID NO: 148583 - protein, 9 aa, Homo Sapiens
SRAALQRYL

SEQ ID NO: 148584 - protein, 9 aa, Homo Sapiens
SRADLIKQY

SEQ ID NO: 148585 - protein, 9 aa, Homo Sapiens
SRADTILCL

SEQ ID NO: 148586 - protein, 9 aa, Homo Sapiens
SRAELEQKI

SEQ ID NO: 148587 - protein, 9 aa, Homo Sapiens
SRAELVQLV

SEQ ID NO: 148588 - protein, 9 aa, Homo Sapiens
SRAFLAQAL

SEQ ID NO: 148589 - protein, 9 aa, Homo Sapiens
SRANVLNKV

SEQ ID NO: 148590 - protein, 9 aa, Homo Sapiens
SRAPFIRNI

SEQ ID NO: 148591 - protein, 9 aa, Homo Sapiens
SRAQFFLHL

SEQ ID NO: 148592 - protein, 9 aa, Homo Sapiens
SRASPVRLL

SEQ ID NO: 148593 - protein, 9 aa, Homo Sapiens
SRFARLQKL

SEQ ID NO: 148594 - protein, 9 aa, Homo Sapiens
SRFDLLWLI

SEQ ID NO: 148595 - protein, 9 aa, Homo Sapiens
SRFDMIFIV

SEQ ID NO: 148596 - protein, 9 aa, Homo Sapiens
SRFEEAMKL

SEQ ID NO: 148597 - protein, 9 aa, Homo Sapiens
SRFGKFIRI

SEQ ID NO: 148598 - protein, 9 aa, Homo Sapiens
SRFGKFVEI

SEQ ID NO: 148599 - protein, 9 aa, Homo Sapiens
SRFIKFQEM

SEQ ID NO: 148600 - protein, 9 aa, Homo Sapiens
SRFPEALRL

SEQ ID NO: 148601 - protein, 9 aa, Homo Sapiens
SRFPMPRYI

SEQ ID NO: 148602 - protein, 9 aa, Homo Sapiens
SRFPYYNSL

SEQ ID NO: 148603 - protein, 9 aa, Homo Sapiens
SRFSRVVLV

SEQ ID NO: 148604 - protein, 9 aa, Homo Sapiens
SRFYYEQRL

SEQ ID NO: 148605 - protein, 9 aa, Homo Sapiens
SRGDFVVEY

SEQ ID NO: 148606 - protein, 9 aa, Homo Sapiens
SRHGLEQYL

SEQ ID NO: 148607 - protein, 9 aa, Homo Sapiens
SRIGHIAHL

SEQ ID NO: 148608 - protein, 9 aa, Homo Sapiens
SRIPFNQAL

SEQ ID NO: 148609 - protein, 9 aa, Homo Sapiens
SRKQGVIKL

SEQ ID NO: 148610 - protein, 9 aa, Homo Sapiens
SRLDHPFFV

SEQ ID NO: 148611 - protein, 9 aa, Homo Sapiens
SRNEDLLEV

SEQ ID NO: 148612 - protein, 9 aa, Homo Sapiens
SRNELLQKL

SEQ ID NO: 148613 - protein, 9 aa, Homo Sapiens
SRNENLRLL

SEQ ID NO: 148614 - protein, 9 aa, Homo Sapiens
SRNWNVREM

SEQ ID NO: 148615 - protein, 9 aa, Homo Sapiens
SRPDFLSYL

SEQ ID NO: 148616 - protein, 9 aa, Homo Sapiens
SRPDLILFL

SEQ ID NO: 148617 - protein, 9 aa, Homo Sapiens
SRPDLLKVV

SEQ ID NO: 148618 - protein, 9 aa, Homo Sapiens
SRPDLPLLV

SEQ ID NO: 148619 - protein, 9 aa, Homo Sapiens
SRPDLYLNL

SEQ ID NO: 148620 - protein, 9 aa, Homo Sapiens
SRPEIIFLL

SEQ ID NO: 148621 - protein, 9 aa, Homo Sapiens
SRPELIFRL

SEQ ID NO: 148622 - protein, 9 aa, Homo Sapiens
SRPGFELVI

SEQ ID NO: 148623 - protein, 9 aa, Homo Sapiens
SRPHFLIEL

SEQ ID NO: 148624 - protein, 9 aa, Homo Sapiens
SRPLLENKL

SEQ ID NO: 148625 - protein, 9 aa, Homo Sapiens
SRSDIFNDV

SEQ ID NO: 148626 - protein, 9 aa, Homo Sapiens
SRSEYLNRL

SEQ ID NO: 148627 - protein, 9 aa, Homo Sapiens
SRSHAVLLV

SEQ ID NO: 148628 - protein, 9 aa, Homo Sapiens
SRSHSIFTV

SEQ ID NO: 148629 - protein, 9 aa, Homo Sapiens
SRSLVLNRL

SEQ ID NO: 148630 - protein, 9 aa, Homo Sapiens
SRSPKVLVL

SEQ ID NO: 148631 - protein, 9 aa, Homo Sapiens
SRSPSLNLL

SEQ ID NO: 148632 - protein, 9 aa, Homo Sapiens
SRSPVVITI

SEQ ID NO: 148633 - protein, 9 aa, Homo Sapiens
SRSVIIREL

SEQ ID NO: 148634 - protein, 9 aa, Homo Sapiens
SRVLKVLSV

SEQ ID NO: 148635 - protein, 9 aa, Homo Sapiens
SRYEHVMKL

SEQ ID NO: 148636 - protein, 9 aa, Homo Sapiens
SRYGDIRRL

SEQ ID NO: 148637 - protein, 9 aa, Homo Sapiens
SRYLYTLVI

SEQ ID NO: 148638 - protein, 9 aa, Homo Sapiens
SRYPDLSLV

SEQ ID NO: 148639 - protein, 9 aa, Homo Sapiens
SRYPDQWIV

SEQ ID NO: 148640 - protein, 9 aa, Homo Sapiens
SRYPNGHFV

SEQ ID NO: 148641 - protein, 9 aa, Homo Sapiens
SRYPTISMV

SEQ ID NO: 148642 - protein, 9 aa, Homo Sapiens
SRYQGVNLY

SEQ ID NO: 148643 - protein, 9 aa, Homo Sapiens
SRYSFIQAL

SEQ ID NO: 148644 - protein, 9 aa, Homo Sapiens
SSADLIRHV

SEQ ID NO: 148645 - protein, 9 aa, Homo Sapiens
SSASLVLKR

SEQ ID NO: 148646 - protein, 9 aa, Homo Sapiens
SSFPTVVIY

SEQ ID NO: 148647 - protein, 9 aa, Homo Sapiens
SSVHLVRNV

SEQ ID NO: 148648 - protein, 9 aa, Homo Sapiens
SSVPGVRLL

SEQ ID NO: 148649 - protein, 9 aa, Homo Sapiens
SSYGNIRAV

SEQ ID NO: 148650 - protein, 9 aa, Homo Sapiens
STFSGIKEL

SEQ ID NO: 148651 - protein, 9 aa, Homo Sapiens
STPDHIREI

SEQ ID NO: 148652 - protein, 9 aa, Homo Sapiens
STYAGIRKV

SEQ ID NO: 148653 - protein, 9 aa, Homo Sapiens
SVADVVRFI

SEQ ID NO: 148654 - protein, 9 aa, Homo Sapiens
SVAELLREL

SEQ ID NO: 148655 - protein, 9 aa, Homo Sapiens
SVFPGARLL

SEQ ID NO: 148656 - protein, 9 aa, Homo Sapiens
SVIDHIHLI

SEQ ID NO: 148657 - protein, 9 aa, Homo Sapiens
SVKDLVILL

SEQ ID NO: 148658 - protein, 9 aa, Homo Sapiens
SVPAFASSL

SEQ ID NO: 148659 - protein, 9 aa, Homo Sapiens
SVYGKLRKV

SEQ ID NO: 148660 - protein, 9 aa, Homo Sapiens
SVYPMPRVI

SEQ ID NO: 148661 - protein, 9 aa, Homo Sapiens
SYAEVMRLV

SEQ ID NO: 148662 - protein, 9 aa, Homo Sapiens
SYGLTPRLL

SEQ ID NO: 148663 - protein, 9 aa, Homo Sapiens
SYIAHLRQI

SEQ ID NO: 148664 - protein, 9 aa, Homo Sapiens
SYIEHIFEI

SEQ ID NO: 148665 - protein, 9 aa, Homo Sapiens
SYKYFPSSL

SEQ ID NO: 148666 - protein, 9 aa, Homo Sapiens
SYNYLIRYL

SEQ ID NO: 148667 - protein, 9 aa, Homo Sapiens
SYPDFLRMM

SEQ ID NO: 148668 - protein, 9 aa, Homo Sapiens
SYPGYLRIV

SEQ ID NO: 148669 - protein, 9 aa, Homo Sapiens
SYPTKVRLI

SEQ ID NO: 148670 - protein, 9 aa, Homo Sapiens
SYTEVIRDV

SEQ ID NO: 148671 - protein, 9 aa, Homo Sapiens
SYVNLKRTI

SEQ ID NO: 148672 - protein, 9 aa, Homo Sapiens
SYVTFPREL

SEQ ID NO: 148673 - protein, 9 aa, Homo Sapiens
TAFAHLREV

SEQ ID NO: 148674 - protein, 9 aa, Homo Sapiens
TAFPALRFV

SEQ ID NO: 148675 - protein, 9 aa, Homo Sapiens
TAQTLVRIL

SEQ ID NO: 148676 - protein, 9 aa, Homo Sapiens
TAVALLRLL

SEQ ID NO: 148677 - protein, 9 aa, Homo Sapiens
TAYLFSRFV

SEQ ID NO: 148678 - protein, 9 aa, Homo Sapiens
TAYPSLRLI

SEQ ID NO: 148679 - protein, 9 aa, Homo Sapiens
TGYGMPRQI

SEQ ID NO: 148680 - protein, 9 aa, Homo Sapiens
THFLQPIYL

SEQ ID NO: 148681 - protein, 9 aa, Homo Sapiens
TISPIIKLL

SEQ ID NO: 148682 - protein, 9 aa, Homo Sapiens
TKADLINNL

SEQ ID NO: 148683 - protein, 9 aa, Homo Sapiens
TKPAIIFRI

SEQ ID NO: 148684 - protein, 9 aa, Homo Sapiens
TKPDIIFKL

SEQ ID NO: 148685 - protein, 9 aa, Homo Sapiens
TKPNFISTL

SEQ ID NO: 148686 - protein, 9 aa, Homo Sapiens
TKVPFPLTL

SEQ ID NO: 148687 - protein, 9 aa, Homo Sapiens
TLANVIRQL

SEQ ID NO: 148688 - protein, 9 aa, Homo Sapiens
TLPDNIKFV

SEQ ID NO: 148689 - protein, 9 aa, Homo Sapiens
TLPPFPTRL

SEQ ID NO: 148690 - protein, 9 aa, Homo Sapiens
TLPSMVHLI

SEQ ID NO: 148691 - protein, 9 aa, Homo Sapiens
TLPYFPHVL

SEQ ID NO: 148692 - protein, 9 aa, Homo Sapiens
TPLKIHPLV

SEQ ID NO: 148693 - protein, 9 aa, Homo Sapiens
TQVHVIREV

SEQ ID NO: 148694 - protein, 9 aa, Homo Sapiens
TRAAIMQAL

SEQ ID NO: 148695 - protein, 9 aa, Homo Sapiens
TRADYLIKL

SEQ ID NO: 148696 - protein, 9 aa, Homo Sapiens
TRAEMILKV

SEQ ID NO: 148697 - protein, 9 aa, Homo Sapiens
TRAKLVSKI

SEQ ID NO: 148698 - protein, 9 aa, Homo Sapiens
TRFDMVQLI

SEQ ID NO: 148699 - protein, 9 aa, Homo Sapiens
TRFDQVMKF

SEQ ID NO: 148700 - protein, 9 aa, Homo Sapiens
TRFPSSRMV

SEQ ID NO: 148701 - protein, 9 aa, Homo Sapiens
TRFSLARQV

SEQ ID NO: 148702 - protein, 9 aa, Homo Sapiens
TRFWPIIQI

SEQ ID NO: 148703 - protein, 9 aa, Homo Sapiens
TRHGVPISV

SEQ ID NO: 148704 - protein, 9 aa, Homo Sapiens
TRIDLIQKL

SEQ ID NO: 148705 - protein, 9 aa, Homo Sapiens
TRIEAVKSL

SEQ ID NO: 148706 - protein, 9 aa, Homo Sapiens
TRILVIREI

SEQ ID NO: 148707 - protein, 9 aa, Homo Sapiens
TRIPKIQKL

SEQ ID NO: 148708 - protein, 9 aa, Homo Sapiens
TRIPKIQQL

SEQ ID NO: 148709 - protein, 9 aa, Homo Sapiens
TRIPKVQKL

SEQ ID NO: 148710 - protein, 9 aa, Homo Sapiens
TRIPRVRVL

SEQ ID NO: 148711 - protein, 9 aa, Homo Sapiens
TRIPVINKV

SEQ ID NO: 148712 - protein, 9 aa, Homo Sapiens
TRLPTPVLL

SEQ ID NO: 148713 - protein, 9 aa, Homo Sapiens
TRNDIVNML

SEQ ID NO: 148714 - protein, 9 aa, Homo Sapiens
TRNGRIVLI

SEQ ID NO: 148715 - protein, 9 aa, Homo Sapiens
TRNLDVQLL

SEQ ID NO: 148716 - protein, 9 aa, Homo Sapiens
TRPDMIRIL

SEQ ID NO: 148717 - protein, 9 aa, Homo Sapiens
TRPLILKTL

SEQ ID NO: 148718 - protein, 9 aa, Homo Sapiens
TRPPHVFAI

SEQ ID NO: 148719 - protein, 9 aa, Homo Sapiens
TRPPHVQLL

SEQ ID NO: 148720 - protein, 9 aa, Homo Sapiens
TRPPLIKNL

SEQ ID NO: 148721 - protein, 9 aa, Homo Sapiens
TRPQLLFSL

SEQ ID NO: 148722 - protein, 9 aa, Homo Sapiens
TRPVIIQAL

SEQ ID NO: 148723 - protein, 9 aa, Homo Sapiens
TRPVRAVFV

SEQ ID NO: 148724 - protein, 9 aa, Homo Sapiens
TRPWLSQHL

SEQ ID NO: 148725 - protein, 9 aa, Homo Sapiens
TRSAIILHL

SEQ ID NO: 148726 - protein, 9 aa, Homo Sapiens
TRSEFYKHI

SEQ ID NO: 148727 - protein, 9 aa, Homo Sapiens
TRSGLIQWV

SEQ ID NO: 148728 - protein, 9 aa, Homo Sapiens
TRSPKLFVV

SEQ ID NO: 148729 - protein, 9 aa, Homo Sapiens
TRSPVFSHL

SEQ ID NO: 148730 - protein, 9 aa, Homo Sapiens
TRTNMLLEL

SEQ ID NO: 148731 - protein, 9 aa, Homo Sapiens
TRVDLVTMV

SEQ ID NO: 148732 - protein, 9 aa, Homo Sapiens
TRVKAVRIL

SEQ ID NO: 148733 - protein, 9 aa, Homo Sapiens
TRVPRVQEV

SEQ ID NO: 148734 - protein, 9 aa, Homo Sapiens
TRYHFLILL

SEQ ID NO: 148735 - protein, 9 aa, Homo Sapiens
TRYLFALQL

SEQ ID NO: 148736 - protein, 9 aa, Homo Sapiens
TRYQGVNLY

SEQ ID NO: 148737 - protein, 9 aa, Homo Sapiens
TSATFLRVV

SEQ ID NO: 148738 - protein, 9 aa, Homo Sapiens
TSIGWLRLL

SEQ ID NO: 148739 - protein, 9 aa, Homo Sapiens
TSPEAFLAL

SEQ ID NO: 148740 - protein, 9 aa, Homo Sapiens
TSSWVIRDL

SEQ ID NO: 148741 - protein, 9 aa, Homo Sapiens
TSYPDPILL

SEQ ID NO: 148742 - protein, 9 aa, Homo Sapiens
TTAAFIRVV

SEQ ID NO: 148743 - protein, 9 aa, Homo Sapiens
TTFPRPVTV

SEQ ID NO: 148744 - protein, 9 aa, Homo Sapiens
TVFPKAKQV

SEQ ID NO: 148745 - protein, 9 aa, Homo Sapiens
TVKEFIVFL

SEQ ID NO: 148746 - protein, 9 aa, Homo Sapiens
TVTDVVRFI

SEQ ID NO: 148747 - protein, 9 aa, Homo Sapiens
TVYPMERLL

SEQ ID NO: 148748 - protein, 9 aa, Homo Sapiens
TVYPMERLV

SEQ ID NO: 148749 - protein, 9 aa, Homo Sapiens
TYFGLPRWV

SEQ ID NO: 148750 - protein, 9 aa, Homo Sapiens
TYINHVVSV

SEQ ID NO: 148751 - protein, 9 aa, Homo Sapiens
TYPEVVRMV

SEQ ID NO: 148752 - protein, 9 aa, Homo Sapiens
TYSEFAREL

SEQ ID NO: 148753 - protein, 9 aa, Homo Sapiens
TYTQLVRLI

SEQ ID NO: 148754 - protein, 9 aa, Homo Sapiens
TYVENLRLL

SEQ ID NO: 148755 - protein, 9 aa, Homo Sapiens
TYVPWPLML

SEQ ID NO: 148756 - protein, 9 aa, Homo Sapiens
VAAMQPRML

SEQ ID NO: 148757 - protein, 9 aa, Homo Sapiens
VAAPRPRLL

SEQ ID NO: 148758 - protein, 9 aa, Homo Sapiens
VALAHIRHV

SEQ ID NO: 148759 - protein, 9 aa, Homo Sapiens
VAPVAQVAL

SEQ ID NO: 148760 - protein, 9 aa, Homo Sapiens
VAYPCAILY

SEQ ID NO: 148761 - protein, 9 aa, Homo Sapiens
VFYPYPQYF

SEQ ID NO: 148762 - protein, 9 aa, Homo Sapiens
VGHPFVIQL

SEQ ID NO: 148763 - protein, 9 aa, Homo Sapiens
VHFIKPLLL

SEQ ID NO: 148764 - protein, 9 aa, Homo Sapiens
VHVGHVVRF

SEQ ID NO: 148765 - protein, 9 aa, Homo Sapiens
VIFATVREL

SEQ ID NO: 148766 - protein, 9 aa, Homo Sapiens
VIKTGVRMI

SEQ ID NO: 148767 - protein, 9 aa, Homo Sapiens
VIPTNVPEL

SEQ ID NO: 148768 - protein, 9 aa, Homo Sapiens
VKPEFSFNI

SEQ ID NO: 148769 - protein, 9 aa, Homo Sapiens
VKPNFPFLL

SEQ ID NO: 148770 - protein, 9 aa, Homo Sapiens
VKYNDPIYV

SEQ ID NO: 148771 - protein, 9 aa, Homo Sapiens
VLIDYQRNV

SEQ ID NO: 148772 - protein, 9 aa, Homo Sapiens
VLPGLIHKV

SEQ ID NO: 148773 - protein, 9 aa, Homo Sapiens
VLPQRIREL

SEQ ID NO: 148774 - protein, 9 aa, Homo Sapiens
VNFTVDQIR

SEQ ID NO: 148775 - protein, 9 aa, Homo Sapiens
VNHPFVVKL

SEQ ID NO: 148776 - protein, 9 aa, Homo Sapiens
VNSGIYRVL

SEQ ID NO: 148777 - protein, 9 aa, Homo Sapiens
VQNPALRLV

SEQ ID NO: 148778 - protein, 9 aa, Homo Sapiens
VQPQFTRFL

SEQ ID NO: 148779 - protein, 9 aa, Homo Sapiens
VRAELIRAF

SEQ ID NO: 148780 - protein, 9 aa, Homo Sapiens
VRAEVEQKL

SEQ ID NO: 148781 - protein, 9 aa, Homo Sapiens
VRAKMAIKL

SEQ ID NO: 148782 - protein, 9 aa, Homo Sapiens
VRAKWFPEV

SEQ ID NO: 148783 - protein, 9 aa, Homo Sapiens
VRALPLLRV

SEQ ID NO: 148784 - protein, 9 aa, Homo Sapiens
VRALSIQRL

SEQ ID NO: 148785 - protein, 9 aa, Homo Sapiens
VRANLPQSF

SEQ ID NO: 148786 - protein, 9 aa, Homo Sapiens
VRAWVVFKL

SEQ ID NO: 148787 - protein, 9 aa, Homo Sapiens
VRFDQVTVY

SEQ ID NO: 148788 - protein, 9 aa, Homo Sapiens
VRFGEYQFL

SEQ ID NO: 148789 - protein, 9 aa, Homo Sapiens
VRFGFEVLY

SEQ ID NO: 148790 - protein, 9 aa, Homo Sapiens
VRFKVPQQI

SEQ ID NO: 148791 - protein, 9 aa, Homo Sapiens
VRFLEQQTL

SEQ ID NO: 148792 - protein, 9 aa, Homo Sapiens
VRFSNIMEI

SEQ ID NO: 148793 - protein, 9 aa, Homo Sapiens
VRISKPKTF

SEQ ID NO: 148794 - protein, 9 aa, Homo Sapiens
VRNLFEQLV

SEQ ID NO: 148795 - protein, 9 aa, Homo Sapiens
VRNNVIIVM

SEQ ID NO: 148796 - protein, 9 aa, Homo Sapiens
VRNPFTVTV

SEQ ID NO: 148797 - protein, 9 aa, Homo Sapiens
VRNPRITSL

SEQ ID NO: 148798 - protein, 9 aa, Homo Sapiens
VRPAEPAFL

SEQ ID NO: 148799 - protein, 9 aa, Homo Sapiens
VRPALQHVV

SEQ ID NO: 148800 - protein, 9 aa, Homo Sapiens
VRPDLRQDL

SEQ ID NO: 148801 - protein, 9 aa, Homo Sapiens
VRPDNTYEV

SEQ ID NO: 148802 - protein, 9 aa, Homo Sapiens
VRPDTVRNL

SEQ ID NO: 148803 - protein, 9 aa, Homo Sapiens
VRPFGVSLL

SEQ ID NO: 148804 - protein, 9 aa, Homo Sapiens
VRPGFPVSL

SEQ ID NO: 148805 - protein, 9 aa, Homo Sapiens
VRPGILVLI

SEQ ID NO: 148806 - protein, 9 aa, Homo Sapiens
VRPKVVRSV

SEQ ID NO: 148807 - protein, 9 aa, Homo Sapiens
VRPLFCALL

SEQ ID NO: 148808 - protein, 9 aa, Homo Sapiens
VRPLLPSEL

SEQ ID NO: 148809 - protein, 9 aa, Homo Sapiens
VRPNLPQLL

SEQ ID NO: 148810 - protein, 9 aa, Homo Sapiens
VRPPIVKQL

SEQ ID NO: 148811 - protein, 9 aa, Homo Sapiens
VRPPQIKSL

SEQ ID NO: 148812 - protein, 9 aa, Homo Sapiens
VRPPRPHVV

SEQ ID NO: 148813 - protein, 9 aa, Homo Sapiens
VRPSVIQKL

SEQ ID NO: 148814 - protein, 9 aa, Homo Sapiens
VRPVFLISI

SEQ ID NO: 148815 - protein, 9 aa, Homo Sapiens
VRSDKPKLF

SEQ ID NO: 148816 - protein, 9 aa, Homo Sapiens
VRSPVVHSV

SEQ ID NO: 148817 - protein, 9 aa, Homo Sapiens
VRTSFLLNL

SEQ ID NO: 148818 - protein, 9 aa, Homo Sapiens
VRWPGVKLL

SEQ ID NO: 148819 - protein, 9 aa, Homo Sapiens
VRYPDRITL

SEQ ID NO: 148820 - protein, 9 aa, Homo Sapiens
VRYPERITI

SEQ ID NO: 148821 - protein, 9 aa, Homo Sapiens
VRYPGTTRV

SEQ ID NO: 148822 - protein, 9 aa, Homo Sapiens
VSLDFIRAI

SEQ ID NO: 148823 - protein, 9 aa, Homo Sapiens
VSVSFIRTI

SEQ ID NO: 148824 - protein, 9 aa, Homo Sapiens
VTFPGIKLI

SEQ ID NO: 148825 - protein, 9 aa, Homo Sapiens
VTIDGIRFV

SEQ ID NO: 148826 - protein, 9 aa, Homo Sapiens
VTYNYPVHY

SEQ ID NO: 148827 - protein, 9 aa, Homo Sapiens
VVAFILRQV

SEQ ID NO: 148828 - protein, 9 aa, Homo Sapiens
VVAPLLRKV

SEQ ID NO: 148829 - protein, 9 aa, Homo Sapiens
VVFIGVRYV

SEQ ID NO: 148830 - protein, 9 aa, Homo Sapiens
VVPQFVVFY

SEQ ID NO: 148831 - protein, 9 aa, Homo Sapiens
VVPQLVKLL

SEQ ID NO: 148832 - protein, 9 aa, Homo Sapiens
VVSNITRLI

SEQ ID NO: 148833 - protein, 9 aa, Homo Sapiens
VVVAWERRL

SEQ ID NO: 148834 - protein, 9 aa, Homo Sapiens
VVYPWMRKV

SEQ ID NO: 148835 - protein, 9 aa, Homo Sapiens
VVYPWTQRF

SEQ ID NO: 148836 - protein, 9 aa, Homo Sapiens
VYADWQRWL

SEQ ID NO: 148837 - protein, 9 aa, Homo Sapiens
VYFWLERTM

SEQ ID NO: 148838 - protein, 9 aa, Homo Sapiens
VYHPNVKVV

SEQ ID NO: 148839 - protein, 9 aa, Homo Sapiens
VYIDKVRSL

SEQ ID NO: 148840 - protein, 9 aa, Homo Sapiens
VYIDRVRSL

SEQ ID NO: 148841 - protein, 9 aa, Homo Sapiens
VYPDGIRHI

SEQ ID NO: 148842 - protein, 9 aa, Homo Sapiens
VYPDIIRMI

SEQ ID NO: 148843 - protein, 9 aa, Homo Sapiens
VYSQILRKL

SEQ ID NO: 148844 - protein, 9 aa, Homo Sapiens
VYYLKNREV

SEQ ID NO: 148845 - protein, 9 aa, Homo Sapiens
WAYPRQVFI

SEQ ID NO: 148846 - protein, 9 aa, Homo Sapiens
WRNPHLSML

SEQ ID NO: 148847 - protein, 9 aa, Homo Sapiens
YAFDFARQS

SEQ ID NO: 148848 - protein, 9 aa, Homo Sapiens
YAFNGTQRF

SEQ ID NO: 148849 - protein, 9 aa, Homo Sapiens
YAFNMKATV

SEQ ID NO: 148850 - protein, 9 aa, Homo Sapiens
YAFPKAVSV

SEQ ID NO: 148851 - protein, 9 aa, Homo Sapiens
YAFPKAVTV

SEQ ID NO: 148852 - protein, 9 aa, Homo Sapiens
YAFPKSITV

SEQ ID NO: 148853 - protein, 9 aa, Homo Sapiens
YAFPLAHSL

SEQ ID NO: 148854 - protein, 9 aa, Homo Sapiens
YAFVRPVIL

SEQ ID NO: 148855 - protein, 9 aa, Homo Sapiens
YAIEKVREI

SEQ ID NO: 148856 - protein, 9 aa, Homo Sapiens
YAISMARKI

SEQ ID NO: 148857 - protein, 9 aa, Homo Sapiens
YAYEKPHVV

SEQ ID NO: 148858 - protein, 9 aa, Homo Sapiens
YAYLYIRML

SEQ ID NO: 148859 - protein, 9 aa, Homo Sapiens
YAYPGVLLI

SEQ ID NO: 148860 - protein, 9 aa, Homo Sapiens
YFVPLVKRL

SEQ ID NO: 148861 - protein, 9 aa, Homo Sapiens
YFVPYVHLV

SEQ ID NO: 148862 - protein, 9 aa, Homo Sapiens
YGINNIREL

SEQ ID NO: 148863 - protein, 9 aa, Homo Sapiens
YGMALVRFV

SEQ ID NO: 148864 - protein, 9 aa, Homo Sapiens
YGSFVTRAL

SEQ ID NO: 148865 - protein, 9 aa, Homo Sapiens
YGYEHILTL

SEQ ID NO: 148866 - protein, 9 aa, Homo Sapiens
YIPHGYMEL

SEQ ID NO: 148867 - protein, 9 aa, Homo Sapiens
YKAPILLAL

SEQ ID NO: 148868 - protein, 9 aa, Homo Sapiens
YKAPITNEF

SEQ ID NO: 148869 - protein, 9 aa, Homo Sapiens
YKFDFLQEV

SEQ ID NO: 148870 - protein, 9 aa, Homo Sapiens
YKFDFPVSY

SEQ ID NO: 148871 - protein, 9 aa, Homo Sapiens
YKFERPQYA

SEQ ID NO: 148872 - protein, 9 aa, Homo Sapiens
YKIDHKLLL

SEQ ID NO: 148873 - protein, 9 aa, Homo Sapiens
YKKQFSQYI

SEQ ID NO: 148874 - protein, 9 aa, Homo Sapiens
YKNGWIVMI

SEQ ID NO: 148875 - protein, 9 aa, Homo Sapiens
YKPNLIQAL

SEQ ID NO: 148876 - protein, 9 aa, Homo Sapiens
YKPTYVVYY

SEQ ID NO: 148877 - protein, 9 aa, Homo Sapiens
YKPVFVTEI

SEQ ID NO: 148878 - protein, 9 aa, Homo Sapiens
YKVEYPIMY

SEQ ID NO: 148879 - protein, 9 aa, Homo Sapiens
YKYPFELIM

SEQ ID NO: 148880 - protein, 9 aa, Homo Sapiens
YLADLYHFV

SEQ ID NO: 148881 - protein, 9 aa, Homo Sapiens
YLAPFLRNV

SEQ ID NO: 148882 - protein, 9 aa, Homo Sapiens
YLAPHVRTL

SEQ ID NO: 148883 - protein, 9 aa, Homo Sapiens
YLASLIRSV

SEQ ID NO: 148884 - protein, 9 aa, Homo Sapiens
YLFERIKEL

SEQ ID NO: 148885 - protein, 9 aa, Homo Sapiens
YLSDNVHLV

SEQ ID NO: 148886 - protein, 9 aa, Homo Sapiens
YLVPLLRSL

SEQ ID NO: 148887 - protein, 9 aa, Homo Sapiens
YMPQNPHII

SEQ ID NO: 148888 - protein, 9 aa, Homo Sapiens
YQFTGIKKY

SEQ ID NO: 148889 - protein, 9 aa, Homo Sapiens
YQYPRPLLI

SEQ ID NO: 148890 - protein, 9 aa, Homo Sapiens
YQYPVIIHL

SEQ ID NO: 148891 - protein, 9 aa, Homo Sapiens
YRAENQILL

SEQ ID NO: 148892 - protein, 9 aa, Homo Sapiens
YRAGPMRQI

SEQ ID NO: 148893 - protein, 9 aa, Homo Sapiens
YRAITVRKL

SEQ ID NO: 148894 - protein, 9 aa, Homo Sapiens
YRANVIANI

SEQ ID NO: 148895 - protein, 9 aa, Homo Sapiens
YRAQQIIQL

SEQ ID NO: 148896 - protein, 9 aa, Homo Sapiens
YRDTWVRYL

SEQ ID NO: 148897 - protein, 9 aa, Homo Sapiens
YREILVKEL

SEQ ID NO: 148898 - protein, 9 aa, Homo Sapiens
YRFDAIRTF

SEQ ID NO: 148899 - protein, 9 aa, Homo Sapiens
YRFETVQKL

SEQ ID NO: 148900 - protein, 9 aa, Homo Sapiens
YRFGDSQQL

SEQ ID NO: 148901 - protein, 9 aa, Homo Sapiens
YRFLQTAEM

SEQ ID NO: 148902 - protein, 9 aa, Homo Sapiens
YRFPNMVVA

SEQ ID NO: 148903 - protein, 9 aa, Homo Sapiens
YRFPSSLCV

SEQ ID NO: 148904 - protein, 9 aa, Homo Sapiens
YRGERINQL

SEQ ID NO: 148905 - protein, 9 aa, Homo Sapiens
YRGPAIRAL

SEQ ID NO: 148906 - protein, 9 aa, Homo Sapiens
YRHDLINQL

SEQ ID NO: 148907 - protein, 9 aa, Homo Sapiens
YRHPDPREL

SEQ ID NO: 148908 - protein, 9 aa, Homo Sapiens
YRIELLRKV

SEQ ID NO: 148909 - protein, 9 aa, Homo Sapiens
YRINLQMRL

SEQ ID NO: 148910 - protein, 9 aa, Homo Sapiens
YRIPLNPYL

SEQ ID NO: 148911 - protein, 9 aa, Homo Sapiens
YRIQIQNQI

SEQ ID NO: 148912 - protein, 9 aa, Homo Sapiens
YRKDFQQLL

SEQ ID NO: 148913 - protein, 9 aa, Homo Sapiens
YRMVGGVLV

SEQ ID NO: 148914 - protein, 9 aa, Homo Sapiens
YRNAYTMVL

SEQ ID NO: 148915 - protein, 9 aa, Homo Sapiens
YRNEFTAWY

SEQ ID NO: 148916 - protein, 9 aa, Homo Sapiens
YRNIEPVYL

SEQ ID NO: 148917 - protein, 9 aa, Homo Sapiens
YRNPKLVVT

SEQ ID NO: 148918 - protein, 9 aa, Homo Sapiens
YRNQLLNIF

SEQ ID NO: 148919 - protein, 9 aa, Homo Sapiens
YRPAYLVTL

SEQ ID NO: 148920 - protein, 9 aa, Homo Sapiens
YRPEFLKSY

SEQ ID NO: 148921 - protein, 9 aa, Homo Sapiens
YRPFEPQAL

SEQ ID NO: 148922 - protein, 9 aa, Homo Sapiens
YRPGSVAYV

SEQ ID NO: 148923 - protein, 9 aa, Homo Sapiens
YRPHTITLL

SEQ ID NO: 148924 - protein, 9 aa, Homo Sapiens
YRPISASVL

SEQ ID NO: 148925 - protein, 9 aa, Homo Sapiens
YRPLFENFV

SEQ ID NO: 148926 - protein, 9 aa, Homo Sapiens
YRPLWALLI

SEQ ID NO: 148927 - protein, 9 aa, Homo Sapiens
YRPLYPFSL

SEQ ID NO: 148928 - protein, 9 aa, Homo Sapiens
YRPVKLNEI

SEQ ID NO: 148929 - protein, 9 aa, Homo Sapiens
YRQKQVVIL

SEQ ID NO: 148930 - protein, 9 aa, Homo Sapiens
YRQLLVRTL

SEQ ID NO: 148931 - protein, 9 aa, Homo Sapiens
YRSDGALLL

SEQ ID NO: 148932 - protein, 9 aa, Homo Sapiens
YRSLTLNVV

SEQ ID NO: 148933 - protein, 9 aa, Homo Sapiens
YRTDMIQAL

SEQ ID NO: 148934 - protein, 9 aa, Homo Sapiens
YRVFTTQEL

SEQ ID NO: 148935 - protein, 9 aa, Homo Sapiens
YRVPNMRFL

SEQ ID NO: 148936 - protein, 9 aa, Homo Sapiens
YRVVFPLEL

SEQ ID NO: 148937 - protein, 9 aa, Homo Sapiens
YRYDDMLVV

SEQ ID NO: 148938 - protein, 9 aa, Homo Sapiens
YRYDEQLNL

SEQ ID NO: 148939 - protein, 9 aa, Homo Sapiens
YRYGQLIEI

SEQ ID NO: 148940 - protein, 9 aa, Homo Sapiens
YRYKMPRLI

SEQ ID NO: 148941 - protein, 9 aa, Homo Sapiens
YRYLNTQFI

SEQ ID NO: 148942 - protein, 9 aa, Homo Sapiens
YRYMNPAIV

SEQ ID NO: 148943 - protein, 9 aa, Homo Sapiens
YRYPIVLGY

SEQ ID NO: 148944 - protein, 9 aa, Homo Sapiens
YRYPRPASV

SEQ ID NO: 148945 - protein, 9 aa, Homo Sapiens
YRYVTKLLV

SEQ ID NO: 148946 - protein, 9 aa, Homo Sapiens
YSAPVIHVL

SEQ ID NO: 148947 - protein, 9 aa, Homo Sapiens
YSHPHVRLL

SEQ ID NO: 148948 - protein, 9 aa, Homo Sapiens
YSSMVIRDL

SEQ ID NO: 148949 - protein, 9 aa, Homo Sapiens
YSSPLFRSL

SEQ ID NO: 148950 - protein, 9 aa, Homo Sapiens
YSYFSPRTM

SEQ ID NO: 148951 - protein, 9 aa, Homo Sapiens
YTFGRIVIY

SEQ ID NO: 148952 - protein, 9 aa, Homo Sapiens
YTIEFLRHL

SEQ ID NO: 148953 - protein, 9 aa, Homo Sapiens
YTPDWIFLL

SEQ ID NO: 148954 - protein, 9 aa, Homo Sapiens
YVAPLKREV

SEQ ID NO: 148955 - protein, 9 aa, Homo Sapiens
YVFPGVTRL

SEQ ID NO: 148956 - protein, 9 aa, Homo Sapiens
YVPDIVRCV

SEQ ID NO: 148957 - protein, 9 aa, Homo Sapiens
YYFEGIKQT

SEQ ID NO: 148958 - protein, 9 aa, Homo Sapiens
YYGPLRSVW

SEQ ID NO: 148959 - protein, 9 aa, Homo Sapiens
YYIDCIRQV

SEQ ID NO: 148960 - protein, 9 aa, Homo Sapiens
YYISFLKTL

SEQ ID NO: 148961 - protein, 9 aa, Homo Sapiens
YYITRAKLV

SEQ ID NO: 148962 - protein, 9 aa, Homo Sapiens
YYKDALRFL

SEQ ID NO: 148963 - protein, 9 aa, Homo Sapiens
YYKERLLYL

SEQ ID NO: 148964 - protein, 9 aa, Homo Sapiens
YYLTFVQEL

SEQ ID NO: 148965 - protein, 9 aa, Homo Sapiens
YYRDYPTLV

SEQ ID NO: 148966 - protein, 10 aa, Homo Sapiens
AKSDVPIQLL

SEQ ID NO: 148967 - protein, 10 aa, Homo Sapiens
ARFGPGGQLI

SEQ ID NO: 148968 - protein, 10 aa, Homo Sapiens
ARVFMKSVKL

SEQ ID NO: 148969 - protein, 10 aa, Homo Sapiens
AVVAALSSHK

SEQ ID NO: 148970 - protein, 10 aa, Homo Sapiens
CRAEILHEIA

SEQ ID NO: 148971 - protein, 10 aa, Homo Sapiens
FAYPAIRYLL

SEQ ID NO: 148972 - protein, 10 aa, Homo Sapiens
FLFDGSPTYV

SEQ ID NO: 148973 - protein, 10 aa, Homo Sapiens
FLPARFYQAL

SEQ ID NO: 148974 - protein, 10 aa, Homo Sapiens
FLPEEAWCDL

SEQ ID NO: 148975 - protein, 10 aa, Homo Sapiens
FRMPVLREYL

SEQ ID NO: 148976 - protein, 10 aa, Homo Sapiens
FRNPDTIFIL

SEQ ID NO: 148977 - protein, 10 aa, Homo Sapiens
FRPTFENLIP

SEQ ID NO: 148978 - protein, 10 aa, Homo Sapiens
FRYDLSPITV

SEQ ID NO: 148979 - protein, 10 aa, Homo Sapiens
FYVPFAKALY

SEQ ID NO: 148980 - protein, 10 aa, Homo Sapiens
FYYDGKVMKL

SEQ ID NO: 148981 - protein, 10 aa, Homo Sapiens
GGIPALVRLL

SEQ ID NO: 148982 - protein, 10 aa, Homo Sapiens
HPGRVLLQNL

SEQ ID NO: 148983 - protein, 10 aa, Homo Sapiens
HRPEDVVQFL

SEQ ID NO: 148984 - protein, 10 aa, Homo Sapiens
HRYENVSILF

SEQ ID NO: 148985 - protein, 10 aa, Homo Sapiens
IQRTPKIQVY

SEQ ID NO: 148986 - protein, 10 aa, Homo Sapiens
IRNDEELNKL

SEQ ID NO: 148987 - protein, 10 aa, Homo Sapiens
IRSNNINTLF

SEQ ID NO: 148988 - protein, 10 aa, Homo Sapiens
IRSVVALHNL

SEQ ID NO: 148989 - protein, 10 aa, Homo Sapiens
ISNKTPLVLL

SEQ ID NO: 148990 - protein, 10 aa, Homo Sapiens
LRPEELTNQM

SEQ ID NO: 148991 - protein, 10 aa, Homo Sapiens
LRPLVKPKIV

SEQ ID NO: 148992 - protein, 10 aa, Homo Sapiens
MAGPLRAPLL

SEQ ID NO: 148993 - protein, 10 aa, Homo Sapiens
PYSPPTFRFL

SEQ ID NO: 148994 - protein, 10 aa, Homo Sapiens
QSTDIIRYLF

SEQ ID NO: 148995 - protein, 10 aa, Homo Sapiens
RLPQGIVREL

SEQ ID NO: 148996 - protein, 10 aa, Homo Sapiens
SAVDFIRTLL

SEQ ID NO: 148997 - protein, 10 aa, Homo Sapiens
SIPEFQRAYV

SEQ ID NO: 148998 - protein, 10 aa, Homo Sapiens
SKTGIPLNVL

SEQ ID NO: 148999 - protein, 10 aa, Homo Sapiens
SLMAKYIMDL

SEQ ID NO: 149000 - protein, 10 aa, Homo Sapiens
TTVPPNLRKL

SEQ ID NO: 149001 - protein, 10 aa, Homo Sapiens
VKPNFPFLLF

SEQ ID NO: 149002 - protein, 10 aa, Homo Sapiens
VLPTLPFHVL

SEQ ID NO: 149003 - protein, 10 aa, Homo Sapiens
VSAAGLVQGL

SEQ ID NO: 149004 - protein, 10 aa, Homo Sapiens
YAFNGTQRFL

SEQ ID NO: 149005 - protein, 10 aa, Homo Sapiens
YGYDNVKEYL

SEQ ID NO: 149006 - protein, 10 aa, Homo Sapiens
YLPDGFLRKM

SEQ ID NO: 149007 - protein, 10 aa, Homo Sapiens
YLPSQVSRVV

SEQ ID NO: 149008 - protein, 10 aa, Homo Sapiens
YQFTGIKKYF

SEQ ID NO: 149009 - protein, 10 aa, Homo Sapiens
YRMDGHIQLI

SEQ ID NO: 149010 - protein, 10 aa, Homo Sapiens
YRNPKGFSTL

SEQ ID NO: 149011 - protein, 10 aa, Homo Sapiens
YRPDMIILQI

SEQ ID NO: 149012 - protein, 10 aa, Homo Sapiens
YVGQLAGQVI

SEQ ID NO: 149013 - protein, 10 aa, Homo Sapiens
YYFEGGLRKV

SEQ ID NO: 149014 - protein, 10 aa, Homo Sapiens
YYVDTAVRHV

SEQ ID NO: 149015 - protein, 11 aa, Homo Sapiens
ADREDDPNFFK

SEQ ID NO: 149016 - protein, 11 aa, Homo Sapiens
FGSDQSENVDR

SEQ ID NO: 149017 - protein, 11 aa, Homo Sapiens
FIPGGKASRGL

SEQ ID NO: 149018 - protein, 11 aa, Homo Sapiens
LLWASPPGRWL

SEQ ID NO: 149019 - protein, 11 aa, Homo Sapiens
LTSQLPPLREI

SEQ ID NO: 149020 - protein, 11 aa, Homo Sapiens
LVAQIAAGMEY

SEQ ID NO: 149021 - protein, 11 aa, Homo Sapiens
MAPSETQFSHL

SEQ ID NO: 149022 - protein, 11 aa, Homo Sapiens
PMFIVNTNVPR

SEQ ID NO: 149023 - protein, 11 aa, Homo Sapiens
RLPAVASKRYL

SEQ ID NO: 149024 - protein, 11 aa, Homo Sapiens
RQFVKDSIRLV

SEQ ID NO: 149025 - protein, 11 aa, Homo Sapiens
SAYVIRLEPLL

SEQ ID NO: 149026 - protein, 11 aa, Homo Sapiens
SHKDDSPDLPK

SEQ ID NO: 149027 - protein, 11 aa, Homo Sapiens
VTVPSGELRHV

SEQ ID NO: 149028 - protein, 11 aa, Homo Sapiens
YYIDADLLREI

SEQ ID NO: 149029 - protein, 8 aa, Homo Sapiens
AAGRPLEL

SEQ ID NO: 149030 - protein, 8 aa, Homo Sapiens
AGGHPLEL

SEQ ID NO: 149031 - protein, 8 aa, Homo Sapiens
AGSIPLIL

SEQ ID NO: 149032 - protein, 8 aa, Homo Sapiens
ARGPIQIL

SEQ ID NO: 149033 - protein, 8 aa, Homo Sapiens
ASFVGYSY

SEQ ID NO: 149034 - protein, 8 aa, Homo Sapiens
ASGCPLFF

SEQ ID NO: 149035 - protein, 8 aa, Homo Sapiens
ASGMILVM

SEQ ID NO: 149036 - protein, 8 aa, Homo Sapiens
ASGPELIL

SEQ ID NO: 149037 - protein, 8 aa, Homo Sapiens
ATAPVVTF

SEQ ID NO: 149038 - protein, 8 aa, Homo Sapiens
ATGPDLEF

SEQ ID NO: 149039 - protein, 8 aa, Homo Sapiens
CGGVPIIF

SEQ ID NO: 149040 - protein, 8 aa, Homo Sapiens
CSGAIIVL

SEQ ID NO: 149041 - protein, 8 aa, Homo Sapiens
CVFVHQTL

SEQ ID NO: 149042 - protein, 8 aa, Homo Sapiens
CYIVHEIY

SEQ ID NO: 149043 - protein, 8 aa, Homo Sapiens
EEQLQQIR

SEQ ID NO: 149044 - protein, 8 aa, Homo Sapiens
ESLIACKA

SEQ ID NO: 149045 - protein, 8 aa, Homo Sapiens
FGGEPLSY

SEQ ID NO: 149046 - protein, 8 aa, Homo Sapiens
FRGVVIKY

SEQ ID NO: 149047 - protein, 8 aa, Homo Sapiens
GNYLHPSL

SEQ ID NO: 149048 - protein, 8 aa, Homo Sapiens
GSGLPLVL

SEQ ID NO: 149049 - protein, 8 aa, Homo Sapiens
HAGPPVYF

SEQ ID NO: 149050 - protein, 8 aa, Homo Sapiens
HNLTHPEL

SEQ ID NO: 149051 - protein, 8 aa, Homo Sapiens
HRGIELTL

SEQ ID NO: 149052 - protein, 8 aa, Homo Sapiens
HSFLHPSY

SEQ ID NO: 149053 - protein, 8 aa, Homo Sapiens
HSGPAVYF

SEQ ID NO: 149054 - protein, 8 aa, Homo Sapiens
HSGPFFTF

SEQ ID NO: 149055 - protein, 8 aa, Homo Sapiens
HSGPIHVL

SEQ ID NO: 149056 - protein, 8 aa, Homo Sapiens
HSGPPIVI

SEQ ID NO: 149057 - protein, 8 aa, Homo Sapiens
HSGPQKLL

SEQ ID NO: 149058 - protein, 8 aa, Homo Sapiens
HSHFHDTL

SEQ ID NO: 149059 - protein, 8 aa, Homo Sapiens
HSQFHAPL

SEQ ID NO: 149060 - protein, 8 aa, Homo Sapiens
HTFLHTVY

SEQ ID NO: 149061 - protein, 8 aa, Homo Sapiens
HTGYVIEL

SEQ ID NO: 149062 - protein, 8 aa, Homo Sapiens
HYFLHISL

SEQ ID NO: 149063 - protein, 8 aa, Homo Sapiens
IGGPAILL

SEQ ID NO: 149064 - protein, 8 aa, Homo Sapiens
IRAPIMRM

SEQ ID NO: 149065 - protein, 8 aa, Homo Sapiens
IRFVHKEM

SEQ ID NO: 149066 - protein, 8 aa, Homo Sapiens
IRGVVIVL

SEQ ID NO: 149067 - protein, 8 aa, Homo Sapiens
ITGVVITL

SEQ ID NO: 149068 - protein, 8 aa, Homo Sapiens
KAFIHHEL

SEQ ID NO: 149069 - protein, 8 aa, Homo Sapiens
KAGPILEL

SEQ ID NO: 149070 - protein, 8 aa, Homo Sapiens
KNFVSQEL

SEQ ID NO: 149071 - protein, 8 aa, Homo Sapiens
KSAVGFDY

SEQ ID NO: 149072 - protein, 8 aa, Homo Sapiens
KSFYHVSY

SEQ ID NO: 149073 - protein, 8 aa, Homo Sapiens
KSGVAITF

SEQ ID NO: 149074 - protein, 8 aa, Homo Sapiens
KSQVHPVL

SEQ ID NO: 149075 - protein, 8 aa, Homo Sapiens
KSYVHSAL

SEQ ID NO: 149076 - protein, 8 aa, Homo Sapiens
KYMPHAVL

SEQ ID NO: 149077 - protein, 8 aa, Homo Sapiens
LAGPALEL

SEQ ID NO: 149078 - protein, 8 aa, Homo Sapiens
LTGPVLEL

SEQ ID NO: 149079 - protein, 8 aa, Homo Sapiens
QRGPVRGI

SEQ ID NO: 149080 - protein, 8 aa, Homo Sapiens
RGGPILTF

SEQ ID NO: 149081 - protein, 8 aa, Homo Sapiens
RNGPYRQL

SEQ ID NO: 149082 - protein, 8 aa, Homo Sapiens
RNYLHYSL

SEQ ID NO: 149083 - protein, 8 aa, Homo Sapiens
RSFFHQHY

SEQ ID NO: 149084 - protein, 8 aa, Homo Sapiens
RTAIHEVM

SEQ ID NO: 149085 - protein, 8 aa, Homo Sapiens
RTGIPISM

SEQ ID NO: 149086 - protein, 8 aa, Homo Sapiens
RTGPALVL

SEQ ID NO: 149087 - protein, 8 aa, Homo Sapiens
RTGPPRLL

SEQ ID NO: 149088 - protein, 8 aa, Homo Sapiens
RVFPHAEF

SEQ ID NO: 149089 - protein, 8 aa, Homo Sapiens
SGGHPLEF

SEQ ID NO: 149090 - protein, 8 aa, Homo Sapiens
SGGPGFTF

SEQ ID NO: 149091 - protein, 8 aa, Homo Sapiens
SGGPVLQF

SEQ ID NO: 149092 - protein, 8 aa, Homo Sapiens
SIYIHCSF

SEQ ID NO: 149093 - protein, 8 aa, Homo Sapiens
SSGLPLIL

SEQ ID NO: 149094 - protein, 8 aa, Homo Sapiens
SSGPERIL

SEQ ID NO: 149095 - protein, 8 aa, Homo Sapiens
STGEPLEL

SEQ ID NO: 149096 - protein, 8 aa, Homo Sapiens
TEELAYLK

SEQ ID NO: 149097 - protein, 8 aa, Homo Sapiens
TRGPVVRL

SEQ ID NO: 149098 - protein, 8 aa, Homo Sapiens
TRGWVQTL

SEQ ID NO: 149099 - protein, 8 aa, Homo Sapiens
TSGPPLTM

SEQ ID NO: 149100 - protein, 8 aa, Homo Sapiens
VGGPEIEL

SEQ ID NO: 149101 - protein, 8 aa, Homo Sapiens
VGVVNPIL

SEQ ID NO: 149102 - protein, 8 aa, Homo Sapiens
VIGPPVVL

SEQ ID NO: 149103 - protein, 8 aa, Homo Sapiens
VRGVVHVY

SEQ ID NO: 149104 - protein, 8 aa, Homo Sapiens
VSGICIVF

SEQ ID NO: 149105 - protein, 8 aa, Homo Sapiens
VSGPAMTL

SEQ ID NO: 149106 - protein, 8 aa, Homo Sapiens
VSSIPLVL

SEQ ID NO: 149107 - protein, 8 aa, Homo Sapiens
VTDTNVIL

SEQ ID NO: 149108 - protein, 8 aa, Homo Sapiens
VTGPEIVY

SEQ ID NO: 149109 - protein, 8 aa, Homo Sapiens
VTGVPLSY

SEQ ID NO: 149110 - protein, 8 aa, Homo Sapiens
YEDIAQKS

SEQ ID NO: 149111 - protein, 8 aa, Homo Sapiens
YEEIAQRS

SEQ ID NO: 149112 - protein, 8 aa, Homo Sapiens
YNLIHPEY

SEQ ID NO: 149113 - protein, 8 aa, Homo Sapiens
YRGPANGF

SEQ ID NO: 149114 - protein, 8 aa, Homo Sapiens
YRGPCHTY

SEQ ID NO: 149115 - protein, 8 aa, Homo Sapiens
YSAPGRDL

SEQ ID NO: 149116 - protein, 8 aa, Homo Sapiens
YSGVLITL

SEQ ID NO: 149117 - protein, 9 aa, Homo Sapiens
AAAPAGTTF

SEQ ID NO: 149118 - protein, 9 aa, Homo Sapiens
AANKTIIYL

SEQ ID NO: 149119 - protein, 9 aa, Homo Sapiens
AANPHSFVF

SEQ ID NO: 149120 - protein, 9 aa, Homo Sapiens
AAPALASSL

SEQ ID NO: 149121 - protein, 9 aa, Homo Sapiens
AAPTSAAAL

SEQ ID NO: 149122 - protein, 9 aa, Homo Sapiens
AAPVPTTTL

SEQ ID NO: 149123 - protein, 9 aa, Homo Sapiens
AFNPEPLVL

SEQ ID NO: 149124 - protein, 9 aa, Homo Sapiens
AMYPHIFYF

SEQ ID NO: 149125 - protein, 9 aa, Homo Sapiens
AMYVHAYTL

SEQ ID NO: 149126 - protein, 9 aa, Homo Sapiens
ANKYQVFFF

SEQ ID NO: 149127 - protein, 9 aa, Homo Sapiens
ANSSIRPIF

SEQ ID NO: 149128 - protein, 9 aa, Homo Sapiens
AQNRFLLEL

SEQ ID NO: 149129 - protein, 9 aa, Homo Sapiens
ARADFQKVL

SEQ ID NO: 149130 - protein, 9 aa, Homo Sapiens
ARAHSIQIM

SEQ ID NO: 149131 - protein, 9 aa, Homo Sapiens
ARAPGTRTL

SEQ ID NO: 149132 - protein, 9 aa, Homo Sapiens
ARCDFALFL

SEQ ID NO: 149133 - protein, 9 aa, Homo Sapiens
ARCPSPKLL

SEQ ID NO: 149134 - protein, 9 aa, Homo Sapiens
ARDDTHYLL

SEQ ID NO: 149135 - protein, 9 aa, Homo Sapiens
ARDPGARVL

SEQ ID NO: 149136 - protein, 9 aa, Homo Sapiens
ARFGSVNEL

SEQ ID NO: 149137 - protein, 9 aa, Homo Sapiens
ARGPLRQTF

SEQ ID NO: 149138 - protein, 9 aa, Homo Sapiens
ARGQYVKFL

SEQ ID NO: 149139 - protein, 9 aa, Homo Sapiens
ARHSLLQTL

SEQ ID NO: 149140 - protein, 9 aa, Homo Sapiens
ARLAETREL

SEQ ID NO: 149141 - protein, 9 aa, Homo Sapiens
ARLDLPYEL

SEQ ID NO: 149142 - protein, 9 aa, Homo Sapiens
ARLKDIIVM

SEQ ID NO: 149143 - protein, 9 aa, Homo Sapiens
ARLKEVLEY

SEQ ID NO: 149144 - protein, 9 aa, Homo Sapiens
ARLNWILHF

SEQ ID NO: 149145 - protein, 9 aa, Homo Sapiens
ARLPLVNSY

SEQ ID NO: 149146 - protein, 9 aa, Homo Sapiens
ARMEFAWIY

SEQ ID NO: 149147 - protein, 9 aa, Homo Sapiens
ARMEFILRH

SEQ ID NO: 149148 - protein, 9 aa, Homo Sapiens
ARNDYLLTL

SEQ ID NO: 149149 - protein, 9 aa, Homo Sapiens
ARNEYLLNL

SEQ ID NO: 149150 - protein, 9 aa, Homo Sapiens
ARNEYLLSL

SEQ ID NO: 149151 - protein, 9 aa, Homo Sapiens
ARNLFCLQL

SEQ ID NO: 149152 - protein, 9 aa, Homo Sapiens
ARNPSTVCL

SEQ ID NO: 149153 - protein, 9 aa, Homo Sapiens
ARNTVTQVL

SEQ ID NO: 149154 - protein, 9 aa, Homo Sapiens
ARPQVSLTF

SEQ ID NO: 149155 - protein, 9 aa, Homo Sapiens
ARPRTEVSL

SEQ ID NO: 149156 - protein, 9 aa, Homo Sapiens
ARRENILVM

SEQ ID NO: 149157 - protein, 9 aa, Homo Sapiens
ARTVFCMQL

SEQ ID NO: 149158 - protein, 9 aa, Homo Sapiens
ARVIFITEY

SEQ ID NO: 149159 - protein, 9 aa, Homo Sapiens
ASADTAYVL

SEQ ID NO: 149160 - protein, 9 aa, Homo Sapiens
ASFHRVWSF

SEQ ID NO: 149161 - protein, 9 aa, Homo Sapiens
ASGGHYYSY

SEQ ID NO: 149162 - protein, 9 aa, Homo Sapiens
ASHLHIHVF

SEQ ID NO: 149163 - protein, 9 aa, Homo Sapiens
ASLLHPVVY

SEQ ID NO: 149164 - protein, 9 aa, Homo Sapiens
ASLMHSFIL

SEQ ID NO: 149165 - protein, 9 aa, Homo Sapiens
ASNKYLVEF

SEQ ID NO: 149166 - protein, 9 aa, Homo Sapiens
ASNPAMLLY

SEQ ID NO: 149167 - protein, 9 aa, Homo Sapiens
ASPSSIRSL

SEQ ID NO: 149168 - protein, 9 aa, Homo Sapiens
ASSGHYIAY

SEQ ID NO: 149169 - protein, 9 aa, Homo Sapiens
ASSPHGLVM

SEQ ID NO: 149170 - protein, 9 aa, Homo Sapiens
ASTPVAREL

SEQ ID NO: 149171 - protein, 9 aa, Homo Sapiens
ATFARIWYL

SEQ ID NO: 149172 - protein, 9 aa, Homo Sapiens
ATIAIAYIM

SEQ ID NO: 149173 - protein, 9 aa, Homo Sapiens
ATISYILTL

SEQ ID NO: 149174 - protein, 9 aa, Homo Sapiens
ATNAAVTVL

SEQ ID NO: 149175 - protein, 9 aa, Homo Sapiens
ATNKITIIF

SEQ ID NO: 149176 - protein, 9 aa, Homo Sapiens
ATNPESKVF

SEQ ID NO: 149177 - protein, 9 aa, Homo Sapiens
ATNPISRVL

SEQ ID NO: 149178 - protein, 9 aa, Homo Sapiens
ATNPKPVKL

SEQ ID NO: 149179 - protein, 9 aa, Homo Sapiens
ATSKVALVY

SEQ ID NO: 149180 - protein, 9 aa, Homo Sapiens
AVLDFCYHL

SEQ ID NO: 149181 - protein, 9 aa, Homo Sapiens
AVSEAAIIL

SEQ ID NO: 149182 - protein, 9 aa, Homo Sapiens
AVSPYSIVL

SEQ ID NO: 149183 - protein, 9 aa, Homo Sapiens
AYKDAIYVF

SEQ ID NO: 149184 - protein, 9 aa, Homo Sapiens
AYSSYVHQY

SEQ ID NO: 149185 - protein, 9 aa, Homo Sapiens
CRDDIFYIL

SEQ ID NO: 149186 - protein, 9 aa, Homo Sapiens
CRESGVRNL

SEQ ID NO: 149187 - protein, 9 aa, Homo Sapiens
CVYVHETVL

SEQ ID NO: 149188 - protein, 9 aa, Homo Sapiens
EMKPHPWFF

SEQ ID NO: 149189 - protein, 9 aa, Homo Sapiens
ERNPAVYNF

SEQ ID NO: 149190 - protein, 9 aa, Homo Sapiens
ERVSYALLF

SEQ ID NO: 149191 - protein, 9 aa, Homo Sapiens
FAPENTCHL

SEQ ID NO: 149192 - protein, 9 aa, Homo Sapiens
FGRPVIVAY

SEQ ID NO: 149193 - protein, 9 aa, Homo Sapiens
FRGPVVPAF

SEQ ID NO: 149194 - protein, 9 aa, Homo Sapiens
FRGVLHQVM

SEQ ID NO: 149195 - protein, 9 aa, Homo Sapiens
FRMPVLREY

SEQ ID NO: 149196 - protein, 9 aa, Homo Sapiens
FRPLYTHEY

SEQ ID NO: 149197 - protein, 9 aa, Homo Sapiens
FRVDYILSV

SEQ ID NO: 149198 - protein, 9 aa, Homo Sapiens
FRVPTANVS

SEQ ID NO: 149199 - protein, 9 aa, Homo Sapiens
FRYHGLSSL

SEQ ID NO: 149200 - protein, 9 aa, Homo Sapiens
FRYTAGTPY

SEQ ID NO: 149201 - protein, 9 aa, Homo Sapiens
FSNPYSIEY

SEQ ID NO: 149202 - protein, 9 aa, Homo Sapiens
FTNRTVLEL

SEQ ID NO: 149203 - protein, 9 aa, Homo Sapiens
GAPVAAAAL

SEQ ID NO: 149204 - protein, 9 aa, Homo Sapiens
GGPGGVGGL

SEQ ID NO: 149205 - protein, 9 aa, Homo Sapiens
GNLRFVYEL

SEQ ID NO: 149206 - protein, 9 aa, Homo Sapiens
GNYFHHVVL

SEQ ID NO: 149207 - protein, 9 aa, Homo Sapiens
GNYYKPWFF

SEQ ID NO: 149208 - protein, 9 aa, Homo Sapiens
GRAPQVLVL

SEQ ID NO: 149209 - protein, 9 aa, Homo Sapiens
GRFEDVYQL

SEQ ID NO: 149210 - protein, 9 aa, Homo Sapiens
GRHSLPKTL

SEQ ID NO: 149211 - protein, 9 aa, Homo Sapiens
GRMVQVHEL

SEQ ID NO: 149212 - protein, 9 aa, Homo Sapiens
GRNPFVHEL

SEQ ID NO: 149213 - protein, 9 aa, Homo Sapiens
GRNSTPLHL

SEQ ID NO: 149214 - protein, 9 aa, Homo Sapiens
GRSCIILEF

SEQ ID NO: 149215 - protein, 9 aa, Homo Sapiens
GRYHVIRKL

SEQ ID NO: 149216 - protein, 9 aa, Homo Sapiens
GSNPVRVSF

SEQ ID NO: 149217 - protein, 9 aa, Homo Sapiens
GTSPYVYQL

SEQ ID NO: 149218 - protein, 9 aa, Homo Sapiens
GYPGGIHEV

SEQ ID NO: 149219 - protein, 9 aa, Homo Sapiens
HLPSGVKSL

SEQ ID NO: 149220 - protein, 9 aa, Homo Sapiens
HNKEPVYSL

SEQ ID NO: 149221 - protein, 9 aa, Homo Sapiens
HNSGVPVYL

SEQ ID NO: 149222 - protein, 9 aa, Homo Sapiens
HNSNIIKKL

SEQ ID NO: 149223 - protein, 9 aa, Homo Sapiens
HNVGYHIVY

SEQ ID NO: 149224 - protein, 9 aa, Homo Sapiens
HNVSFAFEL

SEQ ID NO: 149225 - protein, 9 aa, Homo Sapiens
HRGLFIQQL

SEQ ID NO: 149226 - protein, 9 aa, Homo Sapiens
HRLPPVTSF

SEQ ID NO: 149227 - protein, 9 aa, Homo Sapiens
HRNEVTVEL

SEQ ID NO: 149228 - protein, 9 aa, Homo Sapiens
HRNGGLITL

SEQ ID NO: 149229 - protein, 9 aa, Homo Sapiens
HRPEFSSCL

SEQ ID NO: 149230 - protein, 9 aa, Homo Sapiens
HRWEVCLTM

SEQ ID NO: 149231 - protein, 9 aa, Homo Sapiens
HRYEVVTEL

SEQ ID NO: 149232 - protein, 9 aa, Homo Sapiens
HRYPAVHVY

SEQ ID NO: 149233 - protein, 9 aa, Homo Sapiens
HSGPIHVLL

SEQ ID NO: 149234 - protein, 9 aa, Homo Sapiens
HSNPYFFLL

SEQ ID NO: 149235 - protein, 9 aa, Homo Sapiens
HSPPFSKTL

SEQ ID NO: 149236 - protein, 9 aa, Homo Sapiens
HSTVHLIEF

SEQ ID NO: 149237 - protein, 9 aa, Homo Sapiens
HSYFHKWSA

SEQ ID NO: 149238 - protein, 9 aa, Homo Sapiens
HTHDYPYSL

SEQ ID NO: 149239 - protein, 9 aa, Homo Sapiens
IAPGVTHEL

SEQ ID NO: 149240 - protein, 9 aa, Homo Sapiens
IINSNPIEL

SEQ ID NO: 149241 - protein, 9 aa, Homo Sapiens
IQPNIQLIL

SEQ ID NO: 149242 - protein, 9 aa, Homo Sapiens
IRDDHIRFI

SEQ ID NO: 149243 - protein, 9 aa, Homo Sapiens
IRFQEERRL

SEQ ID NO: 149244 - protein, 9 aa, Homo Sapiens
IRGPTQHEL

SEQ ID NO: 149245 - protein, 9 aa, Homo Sapiens
IRHETIRVA

SEQ ID NO: 149246 - protein, 9 aa, Homo Sapiens
IRHPNIITL

SEQ ID NO: 149247 - protein, 9 aa, Homo Sapiens
IRKPYIWEY

SEQ ID NO: 149248 - protein, 9 aa, Homo Sapiens
IRMTYIKEL

SEQ ID NO: 149249 - protein, 9 aa, Homo Sapiens
IRNDYYLNL

SEQ ID NO: 149250 - protein, 9 aa, Homo Sapiens
IRNHHVASL

SEQ ID NO: 149251 - protein, 9 aa, Homo Sapiens
IRNQIIREL

SEQ ID NO: 149252 - protein, 9 aa, Homo Sapiens
IRPEHVLRL

SEQ ID NO: 149253 - protein, 9 aa, Homo Sapiens
IRPENVIIY

SEQ ID NO: 149254 - protein, 9 aa, Homo Sapiens
IRPGTAFEL

SEQ ID NO: 149255 - protein, 9 aa, Homo Sapiens
IRPQVVTTF

SEQ ID NO: 149256 - protein, 9 aa, Homo Sapiens
IRSSHIKYI

SEQ ID NO: 149257 - protein, 9 aa, Homo Sapiens
IRSSYIRVL

SEQ ID NO: 149258 - protein, 9 aa, Homo Sapiens
IRVDKITEY

SEQ ID NO: 149259 - protein, 9 aa, Homo Sapiens
IRYPDSHQL

SEQ ID NO: 149260 - protein, 9 aa, Homo Sapiens
ITNKYQLVF

SEQ ID NO: 149261 - protein, 9 aa, Homo Sapiens
ITQIEHEVS

SEQ ID NO: 149262 - protein, 9 aa, Homo Sapiens
IVPGNVKSL

SEQ ID NO: 149263 - protein, 9 aa, Homo Sapiens
KAAPCIYWL

SEQ ID NO: 149264 - protein, 9 aa, Homo Sapiens
KAFARPWSL

SEQ ID NO: 149265 - protein, 9 aa, Homo Sapiens
KAFPFHIIF

SEQ ID NO: 149266 - protein, 9 aa, Homo Sapiens
KALEVFPEF

SEQ ID NO: 149267 - protein, 9 aa, Homo Sapiens
KANHAELIL

SEQ ID NO: 149268 - protein, 9 aa, Homo Sapiens
KANPALYVL

SEQ ID NO: 149269 - protein, 9 aa, Homo Sapiens
KAPEMTNEL

SEQ ID NO: 149270 - protein, 9 aa, Homo Sapiens
KAPEPLSSL

SEQ ID NO: 149271 - protein, 9 aa, Homo Sapiens
KGFVHKVEL

SEQ ID NO: 149272 - protein, 9 aa, Homo Sapiens
KGSGVVIIM

SEQ ID NO: 149273 - protein, 9 aa, Homo Sapiens
KIKEYIQKY

SEQ ID NO: 149274 - protein, 9 aa, Homo Sapiens
KINEAFIEM

SEQ ID NO: 149275 - protein, 9 aa, Homo Sapiens
KIPDKQYVL

SEQ ID NO: 149276 - protein, 9 aa, Homo Sapiens
KKNPFHLEL

SEQ ID NO: 149277 - protein, 9 aa, Homo Sapiens
KKPELVISY

SEQ ID NO: 149278 - protein, 9 aa, Homo Sapiens
KKPNFILLL

SEQ ID NO: 149279 - protein, 9 aa, Homo Sapiens
KKPTVTLTY

SEQ ID NO: 149280 - protein, 9 aa, Homo Sapiens
KKTEVVITL

SEQ ID NO: 149281 - protein, 9 aa, Homo Sapiens
KLNESVMVF

SEQ ID NO: 149282 - protein, 9 aa, Homo Sapiens
KLNPYAKTM

SEQ ID NO: 149283 - protein, 9 aa, Homo Sapiens
KLPPLPLTL

SEQ ID NO: 149284 - protein, 9 aa, Homo Sapiens
KMHPHPVAL

SEQ ID NO: 149285 - protein, 9 aa, Homo Sapiens
KNAQYVLVF

SEQ ID NO: 149286 - protein, 9 aa, Homo Sapiens
KNFDMVIVY

SEQ ID NO: 149287 - protein, 9 aa, Homo Sapiens
KNFVHAQCL

SEQ ID NO: 149288 - protein, 9 aa, Homo Sapiens
KNSYHPVSL

SEQ ID NO: 149289 - protein, 9 aa, Homo Sapiens
KNTDIAKEL

SEQ ID NO: 149290 - protein, 9 aa, Homo Sapiens
KNYTLVTVF

SEQ ID NO: 149291 - protein, 9 aa, Homo Sapiens
KQLDFTYEM

SEQ ID NO: 149292 - protein, 9 aa, Homo Sapiens
KRADLQSTF

SEQ ID NO: 149293 - protein, 9 aa, Homo Sapiens
KRADWLARL

SEQ ID NO: 149294 - protein, 9 aa, Homo Sapiens
KRAEEILRL

SEQ ID NO: 149295 - protein, 9 aa, Homo Sapiens
KRAPGIRSW

SEQ ID NO: 149296 - protein, 9 aa, Homo Sapiens
KRASYILRL

SEQ ID NO: 149297 - protein, 9 aa, Homo Sapiens
KRAYIPRTL

SEQ ID NO: 149298 - protein, 9 aa, Homo Sapiens
KRCDNMRVF

SEQ ID NO: 149299 - protein, 9 aa, Homo Sapiens
KRDAYVSRL

SEQ ID NO: 149300 - protein, 9 aa, Homo Sapiens
KRFDDKYTL

SEQ ID NO: 149301 - protein, 9 aa, Homo Sapiens
KRFDMAVMF

SEQ ID NO: 149302 - protein, 9 aa, Homo Sapiens
KRFEKVYTH

SEQ ID NO: 149303 - protein, 9 aa, Homo Sapiens
KRFFEVRRV

SEQ ID NO: 149304 - protein, 9 aa, Homo Sapiens
KRFGKAYNL

SEQ ID NO: 149305 - protein, 9 aa, Homo Sapiens
KRFQPVHDL

SEQ ID NO: 149306 - protein, 9 aa, Homo Sapiens
KRFQVAVNL

SEQ ID NO: 149307 - protein, 9 aa, Homo Sapiens
KRFSGTVRL

SEQ ID NO: 149308 - protein, 9 aa, Homo Sapiens
KRGDFIPGL

SEQ ID NO: 149309 - protein, 9 aa, Homo Sapiens
KRGDILKVL

SEQ ID NO: 149310 - protein, 9 aa, Homo Sapiens
KRGDVIYIL

SEQ ID NO: 149311 - protein, 9 aa, Homo Sapiens
KRGEYIKTW

SEQ ID NO: 149312 - protein, 9 aa, Homo Sapiens
KRIDIIHNL

SEQ ID NO: 149313 - protein, 9 aa, Homo Sapiens
KRIDYILVY

SEQ ID NO: 149314 - protein, 9 aa, Homo Sapiens
KRINWRTVL

SEQ ID NO: 149315 - protein, 9 aa, Homo Sapiens
KRLDVEFVL

SEQ ID NO: 149316 - protein, 9 aa, Homo Sapiens
KRLGIARVV

SEQ ID NO: 149317 - protein, 9 aa, Homo Sapiens
KRLKTVLEL

SEQ ID NO: 149318 - protein, 9 aa, Homo Sapiens
KRLNELREL

SEQ ID NO: 149319 - protein, 9 aa, Homo Sapiens
KRLNFITEY

SEQ ID NO: 149320 - protein, 9 aa, Homo Sapiens
KRLQQFLEF

SEQ ID NO: 149321 - protein, 9 aa, Homo Sapiens
KRLSVERIY

SEQ ID NO: 149322 - protein, 9 aa, Homo Sapiens
KRMQHVICV

SEQ ID NO: 149323 - protein, 9 aa, Homo Sapiens
KRNDYVHAL

SEQ ID NO: 149324 - protein, 9 aa, Homo Sapiens
KRNEFLGEL

SEQ ID NO: 149325 - protein, 9 aa, Homo Sapiens
KRNKIFMEF

SEQ ID NO: 149326 - protein, 9 aa, Homo Sapiens
KRPEFVRGY

SEQ ID NO: 149327 - protein, 9 aa, Homo Sapiens
KRPFGVSLL

SEQ ID NO: 149328 - protein, 9 aa, Homo Sapiens
KRPNAILKL

SEQ ID NO: 149329 - protein, 9 aa, Homo Sapiens
KRPRLPRKL

SEQ ID NO: 149330 - protein, 9 aa, Homo Sapiens
KRPSSVKVF

SEQ ID NO: 149331 - protein, 9 aa, Homo Sapiens
KRPVAVYNL

SEQ ID NO: 149332 - protein, 9 aa, Homo Sapiens
KRPVFIFEW

SEQ ID NO: 149333 - protein, 9 aa, Homo Sapiens
KRPVIVKVL

SEQ ID NO: 149334 - protein, 9 aa, Homo Sapiens
KRQEAIFEL

SEQ ID NO: 149335 - protein, 9 aa, Homo Sapiens
KRQEVIYEL

SEQ ID NO: 149336 - protein, 9 aa, Homo Sapiens
KRREPIPSL

SEQ ID NO: 149337 - protein, 9 aa, Homo Sapiens
KRSELVNWY

SEQ ID NO: 149338 - protein, 9 aa, Homo Sapiens
KRSNYITRL

SEQ ID NO: 149339 - protein, 9 aa, Homo Sapiens
KRVEDAYIL

SEQ ID NO: 149340 - protein, 9 aa, Homo Sapiens
KRVFPKWTY

SEQ ID NO: 149341 - protein, 9 aa, Homo Sapiens
KRVTWIVEF

SEQ ID NO: 149342 - protein, 9 aa, Homo Sapiens
KRWESERIL

SEQ ID NO: 149343 - protein, 9 aa, Homo Sapiens
KRWESERVL

SEQ ID NO: 149344 - protein, 9 aa, Homo Sapiens
KRYHIAKVY

SEQ ID NO: 149345 - protein, 9 aa, Homo Sapiens
KRYPECRDL

SEQ ID NO: 149346 - protein, 9 aa, Homo Sapiens
KRYQEALHL

SEQ ID NO: 149347 - protein, 9 aa, Homo Sapiens
KSFEDIHHY

SEQ ID NO: 149348 - protein, 9 aa, Homo Sapiens
KSFEDIHQY

SEQ ID NO: 149349 - protein, 9 aa, Homo Sapiens
KSFEGLFYF

SEQ ID NO: 149350 - protein, 9 aa, Homo Sapiens
KSKDFVQVM

SEQ ID NO: 149351 - protein, 9 aa, Homo Sapiens
KSLGVHYVF

SEQ ID NO: 149352 - protein, 9 aa, Homo Sapiens
KSNPKPLVL

SEQ ID NO: 149353 - protein, 9 aa, Homo Sapiens
KSTDVAKTF

SEQ ID NO: 149354 - protein, 9 aa, Homo Sapiens
KSTPVTVVL

SEQ ID NO: 149355 - protein, 9 aa, Homo Sapiens
KSYSVGVAY

SEQ ID NO: 149356 - protein, 9 aa, Homo Sapiens
KTFPYQHRY

SEQ ID NO: 149357 - protein, 9 aa, Homo Sapiens
KTFVHTVHL

SEQ ID NO: 149358 - protein, 9 aa, Homo Sapiens
KTIDYIQFL

SEQ ID NO: 149359 - protein, 9 aa, Homo Sapiens
KTKEVYELL

SEQ ID NO: 149360 - protein, 9 aa, Homo Sapiens
KTKPFQLQL

SEQ ID NO: 149361 - protein, 9 aa, Homo Sapiens
KTNAIPLTL

SEQ ID NO: 149362 - protein, 9 aa, Homo Sapiens
KTNDYCKSL

SEQ ID NO: 149363 - protein, 9 aa, Homo Sapiens
KTNEMLLNF

SEQ ID NO: 149364 - protein, 9 aa, Homo Sapiens
KTNHVFFLL

SEQ ID NO: 149365 - protein, 9 aa, Homo Sapiens
KTPEEVIEY

SEQ ID NO: 149366 - protein, 9 aa, Homo Sapiens
KTPNFSTLL

SEQ ID NO: 149367 - protein, 9 aa, Homo Sapiens
KTSDFLKVL

SEQ ID NO: 149368 - protein, 9 aa, Homo Sapiens
KTSDVYWVL

SEQ ID NO: 149369 - protein, 9 aa, Homo Sapiens
KTSPYPIIL

SEQ ID NO: 149370 - protein, 9 aa, Homo Sapiens
KTYDYLFKL

SEQ ID NO: 149371 - protein, 9 aa, Homo Sapiens
KVAGIAKVL

SEQ ID NO: 149372 - protein, 9 aa, Homo Sapiens
KVFEYHNVL

SEQ ID NO: 149373 - protein, 9 aa, Homo Sapiens
KVKEFFEKL

SEQ ID NO: 149374 - protein, 9 aa, Homo Sapiens
KVNGRPLEM

SEQ ID NO: 149375 - protein, 9 aa, Homo Sapiens
KVPPFVFFF

SEQ ID NO: 149376 - protein, 9 aa, Homo Sapiens
KVPTFVRML

SEQ ID NO: 149377 - protein, 9 aa, Homo Sapiens
KVSDYEMKL

SEQ ID NO: 149378 - protein, 9 aa, Homo Sapiens
KYADKIYSI

SEQ ID NO: 149379 - protein, 9 aa, Homo Sapiens
KYFDEHYEY

SEQ ID NO: 149380 - protein, 9 aa, Homo Sapiens
KYFEKQFEL

SEQ ID NO: 149381 - protein, 9 aa, Homo Sapiens
KYFLQQWEL

SEQ ID NO: 149382 - protein, 9 aa, Homo Sapiens
KYIGYARQY

SEQ ID NO: 149383 - protein, 9 aa, Homo Sapiens
KYMDVQFDF

SEQ ID NO: 149384 - protein, 9 aa, Homo Sapiens
KYNACILEY

SEQ ID NO: 149385 - protein, 9 aa, Homo Sapiens
LLNSNIPLE

SEQ ID NO: 149386 - protein, 9 aa, Homo Sapiens
LQIDNARLA

SEQ ID NO: 149387 - protein, 9 aa, Homo Sapiens
LRDHSVRVL

SEQ ID NO: 149388 - protein, 9 aa, Homo Sapiens
LRGDFVRRL

SEQ ID NO: 149389 - protein, 9 aa, Homo Sapiens
LRHPAIRVL

SEQ ID NO: 149390 - protein, 9 aa, Homo Sapiens
LRLSYPLEL

SEQ ID NO: 149391 - protein, 9 aa, Homo Sapiens
LRNKVIIEY

SEQ ID NO: 149392 - protein, 9 aa, Homo Sapiens
LRNPDIRVL

SEQ ID NO: 149393 - protein, 9 aa, Homo Sapiens
LRNQSVFNF

SEQ ID NO: 149394 - protein, 9 aa, Homo Sapiens
LRPGVRHPL

SEQ ID NO: 149395 - protein, 9 aa, Homo Sapiens
LRPSTSRSL

SEQ ID NO: 149396 - protein, 9 aa, Homo Sapiens
LRSGVIVRL

SEQ ID NO: 149397 - protein, 9 aa, Homo Sapiens
MAPLKMLAL

SEQ ID NO: 149398 - protein, 9 aa, Homo Sapiens
MQNPNAIIL

SEQ ID NO: 149399 - protein, 9 aa, Homo Sapiens
MRNAVCIFY

SEQ ID NO: 149400 - protein, 9 aa, Homo Sapiens
NRFNYPFEL

SEQ ID NO: 149401 - protein, 9 aa, Homo Sapiens
NRGDFFMTL

SEQ ID NO: 149402 - protein, 9 aa, Homo Sapiens
NRGEVVTSF

SEQ ID NO: 149403 - protein, 9 aa, Homo Sapiens
NRHGLIRKY

SEQ ID NO: 149404 - protein, 9 aa, Homo Sapiens
NSPLPGSEL

SEQ ID NO: 149405 - protein, 9 aa, Homo Sapiens
PIRPDIVNF

SEQ ID NO: 149406 - protein, 9 aa, Homo Sapiens
QIPEIKQTL

SEQ ID NO: 149407 - protein, 9 aa, Homo Sapiens
QQNPQPLIF

SEQ ID NO: 149408 - protein, 9 aa, Homo Sapiens
QRAEIIHHL

SEQ ID NO: 149409 - protein, 9 aa, Homo Sapiens
QRAHQILVL

SEQ ID NO: 149410 - protein, 9 aa, Homo Sapiens
QRGDLIRIL

SEQ ID NO: 149411 - protein, 9 aa, Homo Sapiens
QRMNFLVTL

SEQ ID NO: 149412 - protein, 9 aa, Homo Sapiens
QRNLFILAY

SEQ ID NO: 149413 - protein, 9 aa, Homo Sapiens
QRNPEISHL

SEQ ID NO: 149414 - protein, 9 aa, Homo Sapiens
QRNPEISHM

SEQ ID NO: 149415 - protein, 9 aa, Homo Sapiens
QRNVNIFKF

SEQ ID NO: 149416 - protein, 9 aa, Homo Sapiens
QRPRESYQM

SEQ ID NO: 149417 - protein, 9 aa, Homo Sapiens
QRPTIYYVM

SEQ ID NO: 149418 - protein, 9 aa, Homo Sapiens
QRQDIAFAY

SEQ ID NO: 149419 - protein, 9 aa, Homo Sapiens
QRSRFIVVV

SEQ ID NO: 149420 - protein, 9 aa, Homo Sapiens
QRVDYIMQL

SEQ ID NO: 149421 - protein, 9 aa, Homo Sapiens
QRVSCAHIY

SEQ ID NO: 149422 - protein, 9 aa, Homo Sapiens
QRYHQPHTL

SEQ ID NO: 149423 - protein, 9 aa, Homo Sapiens
QTNDVLLTF

SEQ ID NO: 149424 - protein, 9 aa, Homo Sapiens
RAADVLVYL

SEQ ID NO: 149425 - protein, 9 aa, Homo Sapiens
RAAPFSLEY

SEQ ID NO: 149426 - protein, 9 aa, Homo Sapiens
RAAPHRISL

SEQ ID NO: 149427 - protein, 9 aa, Homo Sapiens
RAQTVVVEY

SEQ ID NO: 149428 - protein, 9 aa, Homo Sapiens
RASQFTIVL

SEQ ID NO: 149429 - protein, 9 aa, Homo Sapiens
RGCDILIVY

SEQ ID NO: 149430 - protein, 9 aa, Homo Sapiens
RGSDVIIML

SEQ ID NO: 149431 - protein, 9 aa, Homo Sapiens
RGVEFVHVY

SEQ ID NO: 149432 - protein, 9 aa, Homo Sapiens
RIAEFAFEY

SEQ ID NO: 149433 - protein, 9 aa, Homo Sapiens
RILDQPYSL

SEQ ID NO: 149434 - protein, 9 aa, Homo Sapiens
RILFHGVFY

SEQ ID NO: 149435 - protein, 9 aa, Homo Sapiens
RILVHEWPM

SEQ ID NO: 149436 - protein, 9 aa, Homo Sapiens
RIPSFVTEL

SEQ ID NO: 149437 - protein, 9 aa, Homo Sapiens
RISDVHFSV

SEQ ID NO: 149438 - protein, 9 aa, Homo Sapiens
RIYPHGLVL

SEQ ID NO: 149439 - protein, 9 aa, Homo Sapiens
RKNPFVYKV

SEQ ID NO: 149440 - protein, 9 aa, Homo Sapiens
RKPKYIHNL

SEQ ID NO: 149441 - protein, 9 aa, Homo Sapiens
RLNDYIFSF

SEQ ID NO: 149442 - protein, 9 aa, Homo Sapiens
RLPAWQPIL

SEQ ID NO: 149443 - protein, 9 aa, Homo Sapiens
RLPDVQLWL

SEQ ID NO: 149444 - protein, 9 aa, Homo Sapiens
RLPEHCIEY

SEQ ID NO: 149445 - protein, 9 aa, Homo Sapiens
RLPEIYIQL

SEQ ID NO: 149446 - protein, 9 aa, Homo Sapiens
RNFHVFLEY

SEQ ID NO: 149447 - protein, 9 aa, Homo Sapiens
RNFVEETVY

SEQ ID NO: 149448 - protein, 9 aa, Homo Sapiens
RNHPYPYLM

SEQ ID NO: 149449 - protein, 9 aa, Homo Sapiens
RNKEIVHTF

SEQ ID NO: 149450 - protein, 9 aa, Homo Sapiens
RNKNIVHML

SEQ ID NO: 149451 - protein, 9 aa, Homo Sapiens
RNLDAQYEM

SEQ ID NO: 149452 - protein, 9 aa, Homo Sapiens
RNLDKAFSY

SEQ ID NO: 149453 - protein, 9 aa, Homo Sapiens
RNLFHRQGF

SEQ ID NO: 149454 - protein, 9 aa, Homo Sapiens
RNLHVVFTM

SEQ ID NO: 149455 - protein, 9 aa, Homo Sapiens
RNLLHDNEL

SEQ ID NO: 149456 - protein, 9 aa, Homo Sapiens
RNLPTIFVY

SEQ ID NO: 149457 - protein, 9 aa, Homo Sapiens
RNLYLIMEF

SEQ ID NO: 149458 - protein, 9 aa, Homo Sapiens
RNNSVVQVL

SEQ ID NO: 149459 - protein, 9 aa, Homo Sapiens
RNRILEIVY

SEQ ID NO: 149460 - protein, 9 aa, Homo Sapiens
RNTFHVISF

SEQ ID NO: 149461 - protein, 9 aa, Homo Sapiens
RNVARCWTY

SEQ ID NO: 149462 - protein, 9 aa, Homo Sapiens
RNYFKKEEL

SEQ ID NO: 149463 - protein, 9 aa, Homo Sapiens
RNYLHYSLY

SEQ ID NO: 149464 - protein, 9 aa, Homo Sapiens
RNYYHESAF

SEQ ID NO: 149465 - protein, 9 aa, Homo Sapiens
RQADFVQVL

SEQ ID NO: 149466 - protein, 9 aa, Homo Sapiens
RQFPTAFEF

SEQ ID NO: 149467 - protein, 9 aa, Homo Sapiens
RQRSLFVVV

SEQ ID NO: 149468 - protein, 9 aa, Homo Sapiens
RRAAEPVTF

SEQ ID NO: 149469 - protein, 9 aa, Homo Sapiens
RRAEVELEY

SEQ ID NO: 149470 - protein, 9 aa, Homo Sapiens
RRAPAHPCL

SEQ ID NO: 149471 - protein, 9 aa, Homo Sapiens
RRAPEPRVI

SEQ ID NO: 149472 - protein, 9 aa, Homo Sapiens
RRAPHLHTL

SEQ ID NO: 149473 - protein, 9 aa, Homo Sapiens
RRAPVVVRL

SEQ ID NO: 149474 - protein, 9 aa, Homo Sapiens
RRAQPLVTL

SEQ ID NO: 149475 - protein, 9 aa, Homo Sapiens
RRATWLHQA

SEQ ID NO: 149476 - protein, 9 aa, Homo Sapiens
RRDGQILVY

SEQ ID NO: 149477 - protein, 9 aa, Homo Sapiens
RRDTNVLVY

SEQ ID NO: 149478 - protein, 9 aa, Homo Sapiens
RRDYVFIEF

SEQ ID NO: 149479 - protein, 9 aa, Homo Sapiens
RRFDCNFDL

SEQ ID NO: 149480 - protein, 9 aa, Homo Sapiens
RRFDTAFFL

SEQ ID NO: 149481 - protein, 9 aa, Homo Sapiens
RRFFPYYVY

SEQ ID NO: 149482 - protein, 9 aa, Homo Sapiens
RRFKEPWFL

SEQ ID NO: 149483 - protein, 9 aa, Homo Sapiens
RRFKWAIEL

SEQ ID NO: 149484 - protein, 9 aa, Homo Sapiens
RRFLAARTL

SEQ ID NO: 149485 - protein, 9 aa, Homo Sapiens
RRFMQTFVL

SEQ ID NO: 149486 - protein, 9 aa, Homo Sapiens
RRFPLEQRL

SEQ ID NO: 149487 - protein, 9 aa, Homo Sapiens
RRFPSPHYL

SEQ ID NO: 149488 - protein, 9 aa, Homo Sapiens
RRFTEIYEF

SEQ ID NO: 149489 - protein, 9 aa, Homo Sapiens
RRFWNSIVM

SEQ ID NO: 149490 - protein, 9 aa, Homo Sapiens
RRGDALIEM

SEQ ID NO: 149491 - protein, 9 aa, Homo Sapiens
RRGDFIHVM

SEQ ID NO: 149492 - protein, 9 aa, Homo Sapiens
RRGDIIEVL

SEQ ID NO: 149493 - protein, 9 aa, Homo Sapiens
RRGDLPFVV

SEQ ID NO: 149494 - protein, 9 aa, Homo Sapiens
RRGDTFYVV

SEQ ID NO: 149495 - protein, 9 aa, Homo Sapiens
RRGEFIQEI

SEQ ID NO: 149496 - protein, 9 aa, Homo Sapiens
RRGEYVLTF

SEQ ID NO: 149497 - protein, 9 aa, Homo Sapiens
RRGIFHIIL

SEQ ID NO: 149498 - protein, 9 aa, Homo Sapiens
RRGILIRQL

SEQ ID NO: 149499 - protein, 9 aa, Homo Sapiens
RRGPGPLTL

SEQ ID NO: 149500 - protein, 9 aa, Homo Sapiens
RRGPGWRPL

SEQ ID NO: 149501 - protein, 9 aa, Homo Sapiens
RRHMEFRKL

SEQ ID NO: 149502 - protein, 9 aa, Homo Sapiens
RRHPACRVL

SEQ ID NO: 149503 - protein, 9 aa, Homo Sapiens
RRHTDPVQL

SEQ ID NO: 149504 - protein, 9 aa, Homo Sapiens
RRHWGGNVL

SEQ ID NO: 149505 - protein, 9 aa, Homo Sapiens
RRIDFVLVY

SEQ ID NO: 149506 - protein, 9 aa, Homo Sapiens
RRIEIAHSL

SEQ ID NO: 149507 - protein, 9 aa, Homo Sapiens
RRIQFPIEM

SEQ ID NO: 149508 - protein, 9 aa, Homo Sapiens
RRKDGVFLY

SEQ ID NO: 149509 - protein, 9 aa, Homo Sapiens
RRKDLVLKY

SEQ ID NO: 149510 - protein, 9 aa, Homo Sapiens
RRKEVVVYL

SEQ ID NO: 149511 - protein, 9 aa, Homo Sapiens
RRLDIVRSL

SEQ ID NO: 149512 - protein, 9 aa, Homo Sapiens
RRLDLVHTA

SEQ ID NO: 149513 - protein, 9 aa, Homo Sapiens
RRLNFVRLL

SEQ ID NO: 149514 - protein, 9 aa, Homo Sapiens
RRMDVFTEA

SEQ ID NO: 149515 - protein, 9 aa, Homo Sapiens
RRMEVYNEF

SEQ ID NO: 149516 - protein, 9 aa, Homo Sapiens
RRNDDIINF

SEQ ID NO: 149517 - protein, 9 aa, Homo Sapiens
RRNDKIIVF

SEQ ID NO: 149518 - protein, 9 aa, Homo Sapiens
RRNPEPLRF

SEQ ID NO: 149519 - protein, 9 aa, Homo Sapiens
RRNPGVVIY

SEQ ID NO: 149520 - protein, 9 aa, Homo Sapiens
RRNPYCRTL

SEQ ID NO: 149521 - protein, 9 aa, Homo Sapiens
RRPEFQTLL

SEQ ID NO: 149522 - protein, 9 aa, Homo Sapiens
RRPEPVQTL

SEQ ID NO: 149523 - protein, 9 aa, Homo Sapiens
RRPIVACEL

SEQ ID NO: 149524 - protein, 9 aa, Homo Sapiens
RRPLFALLL

SEQ ID NO: 149525 - protein, 9 aa, Homo Sapiens
RRPRIPREL

SEQ ID NO: 149526 - protein, 9 aa, Homo Sapiens
RRPSFTRTW

SEQ ID NO: 149527 - protein, 9 aa, Homo Sapiens
RRPYVRVEL

SEQ ID NO: 149528 - protein, 9 aa, Homo Sapiens
RRQEAIYEM

SEQ ID NO: 149529 - protein, 9 aa, Homo Sapiens
RRQELEQVL

SEQ ID NO: 149530 - protein, 9 aa, Homo Sapiens
RRQNVAYEY

SEQ ID NO: 149531 - protein, 9 aa, Homo Sapiens
RRQPQPWCL

SEQ ID NO: 149532 - protein, 9 aa, Homo Sapiens
RRSDDMFTF

SEQ ID NO: 149533 - protein, 9 aa, Homo Sapiens
RRSPFLQVF

SEQ ID NO: 149534 - protein, 9 aa, Homo Sapiens
RRSSIPITV

SEQ ID NO: 149535 - protein, 9 aa, Homo Sapiens
RRSSSWRIL

SEQ ID NO: 149536 - protein, 9 aa, Homo Sapiens
RRTDCAYVV

SEQ ID NO: 149537 - protein, 9 aa, Homo Sapiens
RRVEKHWRL

SEQ ID NO: 149538 - protein, 9 aa, Homo Sapiens
RRVEVTRQL

SEQ ID NO: 149539 - protein, 9 aa, Homo Sapiens
RRWEEVQSY

SEQ ID NO: 149540 - protein, 9 aa, Homo Sapiens
RRWEQALTF

SEQ ID NO: 149541 - protein, 9 aa, Homo Sapiens
RRWHLQHTL

SEQ ID NO: 149542 - protein, 9 aa, Homo Sapiens
RRYCDPVVL

SEQ ID NO: 149543 - protein, 9 aa, Homo Sapiens
RRYEIAVNL

SEQ ID NO: 149544 - protein, 9 aa, Homo Sapiens
RRYNDFVVF

SEQ ID NO: 149545 - protein, 9 aa, Homo Sapiens
RRYPIARVF

SEQ ID NO: 149546 - protein, 9 aa, Homo Sapiens
RRYSTLREL

SEQ ID NO: 149547 - protein, 9 aa, Homo Sapiens
RSFFHQHYL

SEQ ID NO: 149548 - protein, 9 aa, Homo Sapiens
RSFPSVREL

SEQ ID NO: 149549 - protein, 9 aa, Homo Sapiens
RSGPEFTLL

SEQ ID NO: 149550 - protein, 9 aa, Homo Sapiens
RSGPWNRGF

SEQ ID NO: 149551 - protein, 9 aa, Homo Sapiens
RSINQPVAF

SEQ ID NO: 149552 - protein, 9 aa, Homo Sapiens
RSLAYIHSF

SEQ ID NO: 149553 - protein, 9 aa, Homo Sapiens
RSLGVHLSF

SEQ ID NO: 149554 - protein, 9 aa, Homo Sapiens
RSLPFPTVL

SEQ ID NO: 149555 - protein, 9 aa, Homo Sapiens
RSLSTTNVF

SEQ ID NO: 149556 - protein, 9 aa, Homo Sapiens
RSMEAHNIL

SEQ ID NO: 149557 - protein, 9 aa, Homo Sapiens
RSMGLPLQF

SEQ ID NO: 149558 - protein, 9 aa, Homo Sapiens
RSNFLVLCY

SEQ ID NO: 149559 - protein, 9 aa, Homo Sapiens
RSPDFASSF

SEQ ID NO: 149560 - protein, 9 aa, Homo Sapiens
RSQEYKIVL

SEQ ID NO: 149561 - protein, 9 aa, Homo Sapiens
RSRPYPVCF

SEQ ID NO: 149562 - protein, 9 aa, Homo Sapiens
RSSTYVQVL

SEQ ID NO: 149563 - protein, 9 aa, Homo Sapiens
RSVLHHFHF

SEQ ID NO: 149564 - protein, 9 aa, Homo Sapiens
RTADFVFMF

SEQ ID NO: 149565 - protein, 9 aa, Homo Sapiens
RTADVIIMM

SEQ ID NO: 149566 - protein, 9 aa, Homo Sapiens
RTAHVILRY

SEQ ID NO: 149567 - protein, 9 aa, Homo Sapiens
RTATYITEL

SEQ ID NO: 149568 - protein, 9 aa, Homo Sapiens
RTFLHTVCF

SEQ ID NO: 149569 - protein, 9 aa, Homo Sapiens
RTFWHKISY

SEQ ID NO: 149570 - protein, 9 aa, Homo Sapiens
RTHPVATSF

SEQ ID NO: 149571 - protein, 9 aa, Homo Sapiens
RTIATALEY

SEQ ID NO: 149572 - protein, 9 aa, Homo Sapiens
RTIGFFYTL

SEQ ID NO: 149573 - protein, 9 aa, Homo Sapiens
RTKASVHTL

SEQ ID NO: 149574 - protein, 9 aa, Homo Sapiens
RTKDTPLSL

SEQ ID NO: 149575 - protein, 9 aa, Homo Sapiens
RTLDCIHVL

SEQ ID NO: 149576 - protein, 9 aa, Homo Sapiens
RTNEGVIEF

SEQ ID NO: 149577 - protein, 9 aa, Homo Sapiens
RTNNIELHY

SEQ ID NO: 149578 - protein, 9 aa, Homo Sapiens
RTPAAVREL

SEQ ID NO: 149579 - protein, 9 aa, Homo Sapiens
RTPDGQYIY

SEQ ID NO: 149580 - protein, 9 aa, Homo Sapiens
RTPDTPFSL

SEQ ID NO: 149581 - protein, 9 aa, Homo Sapiens
RTPGNRIVY

SEQ ID NO: 149582 - protein, 9 aa, Homo Sapiens
RTSNYIYNF

SEQ ID NO: 149583 - protein, 9 aa, Homo Sapiens
RTSPYRTVL

SEQ ID NO: 149584 - protein, 9 aa, Homo Sapiens
RTYDLYITY

SEQ ID NO: 149585 - protein, 9 aa, Homo Sapiens
RVAIHGWSY

SEQ ID NO: 149586 - protein, 9 aa, Homo Sapiens
RVAMYVHAY

SEQ ID NO: 149587 - protein, 9 aa, Homo Sapiens
RVIDYILDL

SEQ ID NO: 149588 - protein, 9 aa, Homo Sapiens
RVKPAVFDL

SEQ ID NO: 149589 - protein, 9 aa, Homo Sapiens
RVKPNIFSY

SEQ ID NO: 149590 - protein, 9 aa, Homo Sapiens
RVKTVTFEY

SEQ ID NO: 149591 - protein, 9 aa, Homo Sapiens
RVQEAIIHF

SEQ ID NO: 149592 - protein, 9 aa, Homo Sapiens
RVQGFQVEY

SEQ ID NO: 149593 - protein, 9 aa, Homo Sapiens
RVVSYQIRY

SEQ ID NO: 149594 - protein, 9 aa, Homo Sapiens
RVYVHPFHL

SEQ ID NO: 149595 - protein, 9 aa, Homo Sapiens
RYSEAVFYY

SEQ ID NO: 149596 - protein, 9 aa, Homo Sapiens
RYVEFNLLY

SEQ ID NO: 149597 - protein, 9 aa, Homo Sapiens
RYYHCAVTL

SEQ ID NO: 149598 - protein, 9 aa, Homo Sapiens
SAPDKSLEL

SEQ ID NO: 149599 - protein, 9 aa, Homo Sapiens
SAPVPASPL

SEQ ID NO: 149600 - protein, 9 aa, Homo Sapiens
SGPGPAAAL

SEQ ID NO: 149601 - protein, 9 aa, Homo Sapiens
SGPVPGTAI

SEQ ID NO: 149602 - protein, 9 aa, Homo Sapiens
SIIAEVKAQ

SEQ ID NO: 149603 - protein, 9 aa, Homo Sapiens
SINQFALEL

SEQ ID NO: 149604 - protein, 9 aa, Homo Sapiens
SIPLALALS

SEQ ID NO: 149605 - protein, 9 aa, Homo Sapiens
SNFLHPVIY

SEQ ID NO: 149606 - protein, 9 aa, Homo Sapiens
SPREAARVL

SEQ ID NO: 149607 - protein, 9 aa, Homo Sapiens
SRADTILCL

SEQ ID NO: 149608 - protein, 9 aa, Homo Sapiens
SRAKAVRAL

SEQ ID NO: 149609 - protein, 9 aa, Homo Sapiens
SRAPVFLQF

SEQ ID NO: 149610 - protein, 9 aa, Homo Sapiens
SRDKFIREL

SEQ ID NO: 149611 - protein, 9 aa, Homo Sapiens
SRFAKVHIL

SEQ ID NO: 149612 - protein, 9 aa, Homo Sapiens
SRFDMIFIV

SEQ ID NO: 149613 - protein, 9 aa, Homo Sapiens
SRFEKEFSF

SEQ ID NO: 149614 - protein, 9 aa, Homo Sapiens
SRFGNAFHL

SEQ ID NO: 149615 - protein, 9 aa, Homo Sapiens
SRFIFNYVY

SEQ ID NO: 149616 - protein, 9 aa, Homo Sapiens
SRFSNVYHL

SEQ ID NO: 149617 - protein, 9 aa, Homo Sapiens
SRFTYPYLL

SEQ ID NO: 149618 - protein, 9 aa, Homo Sapiens
SRGDFLRHL

SEQ ID NO: 149619 - protein, 9 aa, Homo Sapiens
SRGDFVVEY

SEQ ID NO: 149620 - protein, 9 aa, Homo Sapiens
SRGDVKVIM

SEQ ID NO: 149621 - protein, 9 aa, Homo Sapiens
SRGEGIRTL

SEQ ID NO: 149622 - protein, 9 aa, Homo Sapiens
SRIAGIRVL

SEQ ID NO: 149623 - protein, 9 aa, Homo Sapiens
SRIGHIAHL

SEQ ID NO: 149624 - protein, 9 aa, Homo Sapiens
SRIHPVSTM

SEQ ID NO: 149625 - protein, 9 aa, Homo Sapiens
SRITTHFEL

SEQ ID NO: 149626 - protein, 9 aa, Homo Sapiens
SRKSFVFEL

SEQ ID NO: 149627 - protein, 9 aa, Homo Sapiens
SRLFFVIEY

SEQ ID NO: 149628 - protein, 9 aa, Homo Sapiens
SRLGSSRVL

SEQ ID NO: 149629 - protein, 9 aa, Homo Sapiens
SRLSFCQEL

SEQ ID NO: 149630 - protein, 9 aa, Homo Sapiens
SRMPGELVL

SEQ ID NO: 149631 - protein, 9 aa, Homo Sapiens
SRMYFTQTL

SEQ ID NO: 149632 - protein, 9 aa, Homo Sapiens
SRNAYMLVY

SEQ ID NO: 149633 - protein, 9 aa, Homo Sapiens
SRNDFTLQL

SEQ ID NO: 149634 - protein, 9 aa, Homo Sapiens
SRNEGVATY

SEQ ID NO: 149635 - protein, 9 aa, Homo Sapiens
SRNEIIQSY

SEQ ID NO: 149636 - protein, 9 aa, Homo Sapiens
SRNNFIRNY

SEQ ID NO: 149637 - protein, 9 aa, Homo Sapiens
SRNPQSYHL

SEQ ID NO: 149638 - protein, 9 aa, Homo Sapiens
SRNPTFMCL

SEQ ID NO: 149639 - protein, 9 aa, Homo Sapiens
SRPENAIIY

SEQ ID NO: 149640 - protein, 9 aa, Homo Sapiens
SRPNIILVM

SEQ ID NO: 149641 - protein, 9 aa, Homo Sapiens
SRPRVVIQL

SEQ ID NO: 149642 - protein, 9 aa, Homo Sapiens
SRPSTYYEL

SEQ ID NO: 149643 - protein, 9 aa, Homo Sapiens
SRQGCTITM

SEQ ID NO: 149644 - protein, 9 aa, Homo Sapiens
SRSEYLNRL

SEQ ID NO: 149645 - protein, 9 aa, Homo Sapiens
SRSHSVFQL

SEQ ID NO: 149646 - protein, 9 aa, Homo Sapiens
SRSVIIREL

SEQ ID NO: 149647 - protein, 9 aa, Homo Sapiens
SRTGYVHIY

SEQ ID NO: 149648 - protein, 9 aa, Homo Sapiens
SRVEAVYVL

SEQ ID NO: 149649 - protein, 9 aa, Homo Sapiens
SRVIHIRKL

SEQ ID NO: 149650 - protein, 9 aa, Homo Sapiens
SRVKLILEY

SEQ ID NO: 149651 - protein, 9 aa, Homo Sapiens
SRVQYFWEA

SEQ ID NO: 149652 - protein, 9 aa, Homo Sapiens
SRYGDIRRL

SEQ ID NO: 149653 - protein, 9 aa, Homo Sapiens
SRYQDILVF

SEQ ID NO: 149654 - protein, 9 aa, Homo Sapiens
SSLLEKGLD

SEQ ID NO: 149655 - protein, 9 aa, Homo Sapiens
SSNPVYMEM

SEQ ID NO: 149656 - protein, 9 aa, Homo Sapiens
SSPEFSKTL

SEQ ID NO: 149657 - protein, 9 aa, Homo Sapiens
STNAYMLIY

SEQ ID NO: 149658 - protein, 9 aa, Homo Sapiens
STPDHSFSL

SEQ ID NO: 149659 - protein, 9 aa, Homo Sapiens
SVKHFHVEY

SEQ ID NO: 149660 - protein, 9 aa, Homo Sapiens
SVLPFQIYY

SEQ ID NO: 149661 - protein, 9 aa, Homo Sapiens
SVNRYILQL

SEQ ID NO: 149662 - protein, 9 aa, Homo Sapiens
SVVFHSTVI

SEQ ID NO: 149663 - protein, 9 aa, Homo Sapiens
SYIGFPVEL

SEQ ID NO: 149664 - protein, 9 aa, Homo Sapiens
TAPQGNVDL

SEQ ID NO: 149665 - protein, 9 aa, Homo Sapiens
TNHLHQTPL

SEQ ID NO: 149666 - protein, 9 aa, Homo Sapiens
TRAQWFYEY

SEQ ID NO: 149667 - protein, 9 aa, Homo Sapiens
TRDPLVIEL

SEQ ID NO: 149668 - protein, 9 aa, Homo Sapiens
TRGDYAPIL

SEQ ID NO: 149669 - protein, 9 aa, Homo Sapiens
TRIPRVRVL

SEQ ID NO: 149670 - protein, 9 aa, Homo Sapiens
TRMRHVISY

SEQ ID NO: 149671 - protein, 9 aa, Homo Sapiens
TRMSTVSEL

SEQ ID NO: 149672 - protein, 9 aa, Homo Sapiens
TRNDYVMMY

SEQ ID NO: 149673 - protein, 9 aa, Homo Sapiens
TRNPLVAVY

SEQ ID NO: 149674 - protein, 9 aa, Homo Sapiens
TRSAIILHL

SEQ ID NO: 149675 - protein, 9 aa, Homo Sapiens
TRSFYKHIL

SEQ ID NO: 149676 - protein, 9 aa, Homo Sapiens
TRSKSLKIL

SEQ ID NO: 149677 - protein, 9 aa, Homo Sapiens
TRVDTILEF

SEQ ID NO: 149678 - protein, 9 aa, Homo Sapiens
TRVKAVRIL

SEQ ID NO: 149679 - protein, 9 aa, Homo Sapiens
TRVYLILEY

SEQ ID NO: 149680 - protein, 9 aa, Homo Sapiens
TRWPGFYIL

SEQ ID NO: 149681 - protein, 9 aa, Homo Sapiens
TSPEAFLAL

SEQ ID NO: 149682 - protein, 9 aa, Homo Sapiens
TYVSFPLEL

SEQ ID NO: 149683 - protein, 9 aa, Homo Sapiens
VAPLPRSAL

SEQ ID NO: 149684 - protein, 9 aa, Homo Sapiens
VAPPGCSHL

SEQ ID NO: 149685 - protein, 9 aa, Homo Sapiens
VAPPVSGDL

SEQ ID NO: 149686 - protein, 9 aa, Homo Sapiens
VINPEPITL

SEQ ID NO: 149687 - protein, 9 aa, Homo Sapiens
VRAWVVFKL

SEQ ID NO: 149688 - protein, 9 aa, Homo Sapiens
VRFDQVTVY

SEQ ID NO: 149689 - protein, 9 aa, Homo Sapiens
VRFHRPYRL

SEQ ID NO: 149690 - protein, 9 aa, Homo Sapiens
VRKSIARVL

SEQ ID NO: 149691 - protein, 9 aa, Homo Sapiens
VRLPYPLQM

SEQ ID NO: 149692 - protein, 9 aa, Homo Sapiens
VRMGYQCTF

SEQ ID NO: 149693 - protein, 9 aa, Homo Sapiens
VRNDIYITL

SEQ ID NO: 149694 - protein, 9 aa, Homo Sapiens
VRNNVIIVM

SEQ ID NO: 149695 - protein, 9 aa, Homo Sapiens
VRNPFTVTV

SEQ ID NO: 149696 - protein, 9 aa, Homo Sapiens
VRNPRITSL

SEQ ID NO: 149697 - protein, 9 aa, Homo Sapiens
VRPPTPREL

SEQ ID NO: 149698 - protein, 9 aa, Homo Sapiens
VRPSYWLVL

SEQ ID NO: 149699 - protein, 9 aa, Homo Sapiens
VRSGYYKVL

SEQ ID NO: 149700 - protein, 9 aa, Homo Sapiens
VRSPVVHSV

SEQ ID NO: 149701 - protein, 9 aa, Homo Sapiens
VRTPYTMSY

SEQ ID NO: 149702 - protein, 9 aa, Homo Sapiens
VRVPYFIDL

SEQ ID NO: 149703 - protein, 9 aa, Homo Sapiens
VSNKYGLVF

SEQ ID NO: 149704 - protein, 9 aa, Homo Sapiens
VTKKYHEVL

SEQ ID NO: 149705 - protein, 9 aa, Homo Sapiens
VYKAFVDNY

SEQ ID NO: 149706 - protein, 9 aa, Homo Sapiens
YAAPHFFHL

SEQ ID NO: 149707 - protein, 9 aa, Homo Sapiens
YGSPGILEF

SEQ ID NO: 149708 - protein, 9 aa, Homo Sapiens
YQVGVHYEL

SEQ ID NO: 149709 - protein, 9 aa, Homo Sapiens
YRAPGTPTY

SEQ ID NO: 149710 - protein, 9 aa, Homo Sapiens
YRAQPSVSL

SEQ ID NO: 149711 - protein, 9 aa, Homo Sapiens
YRHDAVKIL

SEQ ID NO: 149712 - protein, 9 aa, Homo Sapiens
YRHPDPREL

SEQ ID NO: 149713 - protein, 9 aa, Homo Sapiens
YRNAYTMVL

SEQ ID NO: 149714 - protein, 9 aa, Homo Sapiens
YRNEFTAWY

SEQ ID NO: 149715 - protein, 9 aa, Homo Sapiens
YRNKFTQKY

SEQ ID NO: 149716 - protein, 9 aa, Homo Sapiens
YRNPCYVSY

SEQ ID NO: 149717 - protein, 9 aa, Homo Sapiens
YRPAYLVTL

SEQ ID NO: 149718 - protein, 9 aa, Homo Sapiens
YRTDMIQAL

SEQ ID NO: 149719 - protein, 9 aa, Homo Sapiens
YSFGGCHRY

SEQ ID NO: 149720 - protein, 9 aa, Homo Sapiens
YSTPHAFTF

SEQ ID NO: 149721 - protein, 9 aa, Homo Sapiens
YTSDYFISY

SEQ ID NO: 149722 - protein, 9 aa, Homo Sapiens
YTTDFIYQL

SEQ ID NO: 149723 - protein, 10 aa, Homo Sapiens
AQFNRMTVEY

SEQ ID NO: 149724 - protein, 10 aa, Homo Sapiens
AQQGHRPYFL

SEQ ID NO: 149725 - protein, 10 aa, Homo Sapiens
ARPRFEPVHF

SEQ ID NO: 149726 - protein, 10 aa, Homo Sapiens
ARSDKPIFTL

SEQ ID NO: 149727 - protein, 10 aa, Homo Sapiens
ARSENLIYTY

SEQ ID NO: 149728 - protein, 10 aa, Homo Sapiens
ARYGKSPYLY

SEQ ID NO: 149729 - protein, 10 aa, Homo Sapiens
ARYSGSYNDY

SEQ ID NO: 149730 - protein, 10 aa, Homo Sapiens
ASFDGRISVY

SEQ ID NO: 149731 - protein, 10 aa, Homo Sapiens
ATYNGPKHSL

SEQ ID NO: 149732 - protein, 10 aa, Homo Sapiens
EEQLQQIRAE

SEQ ID NO: 149733 - protein, 10 aa, Homo Sapiens
FHPEAHAITL

SEQ ID NO: 149734 - protein, 10 aa, Homo Sapiens
GPPPPPGKPQ

SEQ ID NO: 149735 - protein, 10 aa, Homo Sapiens
HRFEQAFYTY

SEQ ID NO: 149736 - protein, 10 aa, Homo Sapiens
IRAPQIGGSF

SEQ ID NO: 149737 - protein, 10 aa, Homo Sapiens
IRLENEIQTY

SEQ ID NO: 149738 - protein, 10 aa, Homo Sapiens
KAEAESLYQS

SEQ ID NO: 149739 - protein, 10 aa, Homo Sapiens
KDIENQYETQ

SEQ ID NO: 149740 - protein, 10 aa, Homo Sapiens
KRHEMPPHIY

SEQ ID NO: 149741 - protein, 10 aa, Homo Sapiens
KRIAEFAFEY

SEQ ID NO: 149742 - protein, 10 aa, Homo Sapiens
KRLDVTVQSF

SEQ ID NO: 149743 - protein, 10 aa, Homo Sapiens
KRMDEQRVLL

SEQ ID NO: 149744 - protein, 10 aa, Homo Sapiens
KRNDYVHALV

SEQ ID NO: 149745 - protein, 10 aa, Homo Sapiens
KRNGVIIAGY

SEQ ID NO: 149746 - protein, 10 aa, Homo Sapiens
KRPTDYFAEM

SEQ ID NO: 149747 - protein, 10 aa, Homo Sapiens
KRYDGDITDL

SEQ ID NO: 149748 - protein, 10 aa, Homo Sapiens
KRYDLEYWAF

SEQ ID NO: 149749 - protein, 10 aa, Homo Sapiens
KSNNEIVLVL

SEQ ID NO: 149750 - protein, 10 aa, Homo Sapiens
KTKDGVREVF

SEQ ID NO: 149751 - protein, 10 aa, Homo Sapiens
KTNDQMVVVY

SEQ ID NO: 149752 - protein, 10 aa, Homo Sapiens
LRAPCLPVTY

SEQ ID NO: 149753 - protein, 10 aa, Homo Sapiens
NRGDKYIAKF

SEQ ID NO: 149754 - protein, 10 aa, Homo Sapiens
RNLDIERPTY

SEQ ID NO: 149755 - protein, 10 aa, Homo Sapiens
RRAEGPPRLA

SEQ ID NO: 149756 - protein, 10 aa, Homo Sapiens
RRFDAMPFTL

SEQ ID NO: 149757 - protein, 10 aa, Homo Sapiens
RRGDFIHVMD

SEQ ID NO: 149758 - protein, 10 aa, Homo Sapiens
RRHTVYLDSY

SEQ ID NO: 149759 - protein, 10 aa, Homo Sapiens
RRIQDPLIEF

SEQ ID NO: 149760 - protein, 10 aa, Homo Sapiens
RRISGVDRYY

SEQ ID NO: 149761 - protein, 10 aa, Homo Sapiens
RRKDFVSEAY

SEQ ID NO: 149762 - protein, 10 aa, Homo Sapiens
RRNEALPVTL

SEQ ID NO: 149763 - protein, 10 aa, Homo Sapiens
RRNNKLIFKV

SEQ ID NO: 149764 - protein, 10 aa, Homo Sapiens
RRPEYTPIHL

SEQ ID NO: 149765 - protein, 10 aa, Homo Sapiens
RRSDPGHYSF

SEQ ID NO: 149766 - protein, 10 aa, Homo Sapiens
RRSINQPVAF

SEQ ID NO: 149767 - protein, 10 aa, Homo Sapiens
RTNHQGTYVL

SEQ ID NO: 149768 - protein, 10 aa, Homo Sapiens
RYIDRIHIFF

SEQ ID NO: 149769 - protein, 10 aa, Homo Sapiens
RYMDDYIFTY

SEQ ID NO: 149770 - protein, 10 aa, Homo Sapiens
RYMELYTHVY

SEQ ID NO: 149771 - protein, 10 aa, Homo Sapiens
SAIPANIHIY

SEQ ID NO: 149772 - protein, 10 aa, Homo Sapiens
SGPQAPVFEF

SEQ ID NO: 149773 - protein, 10 aa, Homo Sapiens
SIEGRVAVEY

SEQ ID NO: 149774 - protein, 10 aa, Homo Sapiens
SREGHCVIFY

SEQ ID NO: 149775 - protein, 10 aa, Homo Sapiens
SREGRPIWQL

SEQ ID NO: 149776 - protein, 10 aa, Homo Sapiens
SRGPGTSFEF

SEQ ID NO: 149777 - protein, 10 aa, Homo Sapiens
SRGQQVIVSY

SEQ ID NO: 149778 - protein, 10 aa, Homo Sapiens
SRHSGPFFTF

SEQ ID NO: 149779 - protein, 10 aa, Homo Sapiens
SRRFFPYYVY

SEQ ID NO: 149780 - protein, 10 aa, Homo Sapiens
SRTNRPPLSL

SEQ ID NO: 149781 - protein, 10 aa, Homo Sapiens
SRVGYPAQVY

SEQ ID NO: 149782 - protein, 10 aa, Homo Sapiens
SRYDGQIAVF

SEQ ID NO: 149783 - protein, 10 aa, Homo Sapiens
STPSEPHPVL

SEQ ID NO: 149784 - protein, 10 aa, Homo Sapiens
SVHGKPSVVY

SEQ ID NO: 149785 - protein, 10 aa, Homo Sapiens
TISSNVASKA

SEQ ID NO: 149786 - protein, 10 aa, Homo Sapiens
TRAQLPVVVF

SEQ ID NO: 149787 - protein, 10 aa, Homo Sapiens
VAPGKDLTKT

SEQ ID NO: 149788 - protein, 10 aa, Homo Sapiens
VRPEQPFIVL

SEQ ID NO: 149789 - protein, 10 aa, Homo Sapiens
YRPETGSWVF

SEQ ID NO: 149790 - protein, 11 aa, Homo Sapiens
ADINGLRQVLD

SEQ ID NO: 149791 - protein, 11 aa, Homo Sapiens
AEQRGELAIKD

SEQ ID NO: 149792 - protein, 11 aa, Homo Sapiens
ARPDEKAIMTY

SEQ ID NO: 149793 - protein, 11 aa, Homo Sapiens
ARYSGSYNDYL

SEQ ID NO: 149794 - protein, 11 aa, Homo Sapiens
EGNCPERIITL

SEQ ID NO: 149795 - protein, 11 aa, Homo Sapiens
IDNNIEQISSY

SEQ ID NO: 149796 - protein, 11 aa, Homo Sapiens
IGTAGASDVHV

SEQ ID NO: 149797 - protein, 11 aa, Homo Sapiens
ISERYGPVFTI

SEQ ID NO: 149798 - protein, 11 aa, Homo Sapiens
KKDVDNAYMIK

SEQ ID NO: 149799 - protein, 11 aa, Homo Sapiens
KRFVPSQHYVY

SEQ ID NO: 149800 - protein, 11 aa, Homo Sapiens
KRIEPADAHVL

SEQ ID NO: 149801 - protein, 11 aa, Homo Sapiens
KRKDEIEREVL

SEQ ID NO: 149802 - protein, 11 aa, Homo Sapiens
KRNDYVHALVA

SEQ ID NO: 149803 - protein, 11 aa, Homo Sapiens
KRYDREFLLGF

SEQ ID NO: 149804 - protein, 11 aa, Homo Sapiens
KYFDKASYRVY

SEQ ID NO: 149805 - protein, 11 aa, Homo Sapiens
KYLDEDTIYHL

SEQ ID NO: 149806 - protein, 11 aa, Homo Sapiens
LRGDPGLRGSL

SEQ ID NO: 149807 - protein, 11 aa, Homo Sapiens
QIKDFLNGPAD

SEQ ID NO: 149808 - protein, 11 aa, Homo Sapiens
RAFPNKQGYVL

SEQ ID NO: 149809 - protein, 11 aa, Homo Sapiens
RRFDPKLFLVF

SEQ ID NO: 149810 - protein, 11 aa, Homo Sapiens
RRFEEALQTIF

SEQ ID NO: 149811 - protein, 11 aa, Homo Sapiens
RRHPEYAVSVL

SEQ ID NO: 149812 - protein, 11 aa, Homo Sapiens
RRSETVVERML

SEQ ID NO: 149813 - protein, 11 aa, Homo Sapiens
RTSAEIAAIVF

SEQ ID NO: 149814 - protein, 11 aa, Homo Sapiens
SKAEAESLYQS

SEQ ID NO: 149815 - protein, 11 aa, Homo Sapiens
SRKESYSIYVY

SEQ ID NO: 149816 - protein, 11 aa, Homo Sapiens
SSRSSSVDYIL

SEQ ID NO: 149817 - protein, 11 aa, Homo Sapiens
SSTISSNVASK

SEQ ID NO: 149818 - protein, 11 aa, Homo Sapiens
SVPGKDAIYSL

SEQ ID NO: 149819 - protein, 11 aa, Homo Sapiens
TEELNREVATN

SEQ ID NO: 149820 - protein, 11 aa, Homo Sapiens
VAPGKDLTKTL

SEQ ID NO: 149821 - protein, 11 aa, Homo Sapiens
VIFHPTQPWVF

SEQ ID NO: 149822 - protein, 11 aa, Homo Sapiens
YGFRPDEPYYY

SEQ ID NO: 149823 - protein, 8 aa, Homo Sapiens
AAPTSSAL

SEQ ID NO: 149824 - protein, 8 aa, Homo Sapiens
AHPPLLVL

SEQ ID NO: 149825 - protein, 8 aa, Homo Sapiens
AKAPHYVL

SEQ ID NO: 149826 - protein, 8 aa, Homo Sapiens
AKGPNIVL

SEQ ID NO: 149827 - protein, 8 aa, Homo Sapiens
APSTAVSV

SEQ ID NO: 149828 - protein, 8 aa, Homo Sapiens
ARAPIIRV

SEQ ID NO: 149829 - protein, 8 aa, Homo Sapiens
ARAPRKVL

SEQ ID NO: 149830 - protein, 8 aa, Homo Sapiens
ARFTFDVY

SEQ ID NO: 149831 - protein, 8 aa, Homo Sapiens
ARPDVVEM

SEQ ID NO: 149832 - protein, 8 aa, Homo Sapiens
ARPEALYY

SEQ ID NO: 149833 - protein, 8 aa, Homo Sapiens
ARYVFSNF

SEQ ID NO: 149834 - protein, 8 aa, Homo Sapiens
CRPLPVTF

SEQ ID NO: 149835 - protein, 8 aa, Homo Sapiens
CYGIRPEL

SEQ ID NO: 149836 - protein, 8 aa, Homo Sapiens
CYHNLDAF

SEQ ID NO: 149837 - protein, 8 aa, Homo Sapiens
CYIVHEIY

SEQ ID NO: 149838 - protein, 8 aa, Homo Sapiens
CYNNQQVF

SEQ ID NO: 149839 - protein, 8 aa, Homo Sapiens
ERPPAYNL

SEQ ID NO: 149840 - protein, 8 aa, Homo Sapiens
ESLITCKA

SEQ ID NO: 149841 - protein, 8 aa, Homo Sapiens
FKLLSHSL

SEQ ID NO: 149842 - protein, 8 aa, Homo Sapiens
FKPPVLVF

SEQ ID NO: 149843 - protein, 8 aa, Homo Sapiens
FKQPFLEL

SEQ ID NO: 149844 - protein, 8 aa, Homo Sapiens
FRVNLRTL

SEQ ID NO: 149845 - protein, 8 aa, Homo Sapiens
FSPTGEIL

SEQ ID NO: 149846 - protein, 8 aa, Homo Sapiens
FSPVGSVL

SEQ ID NO: 149847 - protein, 8 aa, Homo Sapiens
FYAYHYRF

SEQ ID NO: 149848 - protein, 8 aa, Homo Sapiens
FYGRHAEL

SEQ ID NO: 149849 - protein, 8 aa, Homo Sapiens
FYHPAQEY

SEQ ID NO: 149850 - protein, 8 aa, Homo Sapiens
FYPPKVEL

SEQ ID NO: 149851 - protein, 8 aa, Homo Sapiens
FYQEHPDL

SEQ ID NO: 149852 - protein, 8 aa, Homo Sapiens
FYVEHPEV

SEQ ID NO: 149853 - protein, 8 aa, Homo Sapiens
FYVHHDIL

SEQ ID NO: 149854 - protein, 8 aa, Homo Sapiens
FYVVNSEL

SEQ ID NO: 149855 - protein, 8 aa, Homo Sapiens
GAEAKPAE

SEQ ID NO: 149856 - protein, 8 aa, Homo Sapiens
HRPPPIKL

SEQ ID NO: 149857 - protein, 8 aa, Homo Sapiens
HRRPPIGY

SEQ ID NO: 149858 - protein, 8 aa, Homo Sapiens
HRRPPLGL

SEQ ID NO: 149859 - protein, 8 aa, Homo Sapiens
HYFLHISL

SEQ ID NO: 149860 - protein, 8 aa, Homo Sapiens
IAPPERKY

SEQ ID NO: 149861 - protein, 8 aa, Homo Sapiens
IKPPIIHY

SEQ ID NO: 149862 - protein, 8 aa, Homo Sapiens
IRAPIMRM

SEQ ID NO: 149863 - protein, 8 aa, Homo Sapiens
IRFVHKEM

SEQ ID NO: 149864 - protein, 8 aa, Homo Sapiens
IRPPTRTA

SEQ ID NO: 149865 - protein, 8 aa, Homo Sapiens
IYATIPVY

SEQ ID NO: 149866 - protein, 8 aa, Homo Sapiens
KKATAYIL

SEQ ID NO: 149867 - protein, 8 aa, Homo Sapiens
KNGSPYGL

SEQ ID NO: 149868 - protein, 8 aa, Homo Sapiens
KRFSFRSF

SEQ ID NO: 149869 - protein, 8 aa, Homo Sapiens
KRPPLRGV

SEQ ID NO: 149870 - protein, 8 aa, Homo Sapiens
KRPPLRKW

SEQ ID NO: 149871 - protein, 8 aa, Homo Sapiens
KRPPVLRA

SEQ ID NO: 149872 - protein, 8 aa, Homo Sapiens
KRYLFRSF

SEQ ID NO: 149873 - protein, 8 aa, Homo Sapiens
KRYVFDTH

SEQ ID NO: 149874 - protein, 8 aa, Homo Sapiens
LKGPILCF

SEQ ID NO: 149875 - protein, 8 aa, Homo Sapiens
LYAFIGVK

SEQ ID NO: 149876 - protein, 8 aa, Homo Sapiens
LYGTITEF

SEQ ID NO: 149877 - protein, 8 aa, Homo Sapiens
MRPPIIIH

SEQ ID NO: 149878 - protein, 8 aa, Homo Sapiens
MRPVSRVL

SEQ ID NO: 149879 - protein, 8 aa, Homo Sapiens
NHPPGHVL

SEQ ID NO: 149880 - protein, 8 aa, Homo Sapiens
NKGPSYGL

SEQ ID NO: 149881 - protein, 8 aa, Homo Sapiens
NRFYHEEL

SEQ ID NO: 149882 - protein, 8 aa, Homo Sapiens
NRGVIITM

SEQ ID NO: 149883 - protein, 8 aa, Homo Sapiens
NRIPVISL

SEQ ID NO: 149884 - protein, 8 aa, Homo Sapiens
NRPGAYEL

SEQ ID NO: 149885 - protein, 8 aa, Homo Sapiens
NRPITVSY

SEQ ID NO: 149886 - protein, 8 aa, Homo Sapiens
NRVVFQEF

SEQ ID NO: 149887 - protein, 8 aa, Homo Sapiens
NRVVSNLL

SEQ ID NO: 149888 - protein, 8 aa, Homo Sapiens
NRVVTHEL

SEQ ID NO: 149889 - protein, 8 aa, Homo Sapiens
NYGPGPSL

SEQ ID NO: 149890 - protein, 8 aa, Homo Sapiens
NYGQYFTL

SEQ ID NO: 149891 - protein, 8 aa, Homo Sapiens
NYYVRAVL

SEQ ID NO: 149892 - protein, 8 aa, Homo Sapiens
QRWVFVCL

SEQ ID NO: 149893 - protein, 8 aa, Homo Sapiens
RRPKTLRL

SEQ ID NO: 149894 - protein, 8 aa, Homo Sapiens
RYHGLSSL

SEQ ID NO: 149895 - protein, 8 aa, Homo Sapiens
RYWFHYTL

SEQ ID NO: 149896 - protein, 8 aa, Homo Sapiens
SHAPSFNF

SEQ ID NO: 149897 - protein, 8 aa, Homo Sapiens
SKAPVLTY

SEQ ID NO: 149898 - protein, 8 aa, Homo Sapiens
SKGPVVQY

SEQ ID NO: 149899 - protein, 8 aa, Homo Sapiens
SKPPVISL

SEQ ID NO: 149900 - protein, 8 aa, Homo Sapiens
SRPELLEY

SEQ ID NO: 149901 - protein, 8 aa, Homo Sapiens
SRPISPLL

SEQ ID NO: 149902 - protein, 8 aa, Homo Sapiens
SRPNIFIL

SEQ ID NO: 149903 - protein, 8 aa, Homo Sapiens
SRPNSPQL

SEQ ID NO: 149904 - protein, 8 aa, Homo Sapiens
SRPPIQNA

SEQ ID NO: 149905 - protein, 8 aa, Homo Sapiens
SRPPLLGF

SEQ ID NO: 149906 - protein, 8 aa, Homo Sapiens
SRPPVTLR

SEQ ID NO: 149907 - protein, 8 aa, Homo Sapiens
SRPVIINM

SEQ ID NO: 149908 - protein, 8 aa, Homo Sapiens
SRTIVHTL

SEQ ID NO: 149909 - protein, 8 aa, Homo Sapiens
SYPPTKQL

SEQ ID NO: 149910 - protein, 8 aa, Homo Sapiens
SYWNHREL

SEQ ID NO: 149911 - protein, 8 aa, Homo Sapiens
TRGPVVRL

SEQ ID NO: 149912 - protein, 8 aa, Homo Sapiens
TRPPIRVT

SEQ ID NO: 149913 - protein, 8 aa, Homo Sapiens
TRPPKLVL

SEQ ID NO: 149914 - protein, 8 aa, Homo Sapiens
TRPPVRLV

SEQ ID NO: 149915 - protein, 8 aa, Homo Sapiens
TRTEIIIL

SEQ ID NO: 149916 - protein, 8 aa, Homo Sapiens
VHAPPMQL

SEQ ID NO: 149917 - protein, 8 aa, Homo Sapiens
VHAPYYKL

SEQ ID NO: 149918 - protein, 8 aa, Homo Sapiens
VHGPPVQL

SEQ ID NO: 149919 - protein, 8 aa, Homo Sapiens
VHPPHYFF

SEQ ID NO: 149920 - protein, 8 aa, Homo Sapiens
VKPPVRKL

SEQ ID NO: 149921 - protein, 8 aa, Homo Sapiens
VRGCILTL

SEQ ID NO: 149922 - protein, 8 aa, Homo Sapiens
VRHIFTAF

SEQ ID NO: 149923 - protein, 8 aa, Homo Sapiens
VRPGILVL

SEQ ID NO: 149924 - protein, 8 aa, Homo Sapiens
VRPKLPLL

SEQ ID NO: 149925 - protein, 8 aa, Homo Sapiens
VRPLVTEL

SEQ ID NO: 149926 - protein, 8 aa, Homo Sapiens
VRPPIRSH

SEQ ID NO: 149927 - protein, 8 aa, Homo Sapiens
VRPPKKVL

SEQ ID NO: 149928 - protein, 8 aa, Homo Sapiens
VRPPKQLL

SEQ ID NO: 149929 - protein, 8 aa, Homo Sapiens
VRPPKRDL

SEQ ID NO: 149930 - protein, 8 aa, Homo Sapiens
VRPPPYHP

SEQ ID NO: 149931 - protein, 8 aa, Homo Sapiens
VRPPVQVY

SEQ ID NO: 149932 - protein, 8 aa, Homo Sapiens
VRPVPLEL

SEQ ID NO: 149933 - protein, 8 aa, Homo Sapiens
VRPVTLNM

SEQ ID NO: 149934 - protein, 8 aa, Homo Sapiens
VYFVHPTF

SEQ ID NO: 149935 - protein, 8 aa, Homo Sapiens
VYPPIRHH

SEQ ID NO: 149936 - protein, 8 aa, Homo Sapiens
VYVLHPQY

SEQ ID NO: 149937 - protein, 8 aa, Homo Sapiens
YKGPGFEY

SEQ ID NO: 149938 - protein, 8 aa, Homo Sapiens
YKGPRIVL

SEQ ID NO: 149939 - protein, 8 aa, Homo Sapiens
YKPPGFSL

SEQ ID NO: 149940 - protein, 8 aa, Homo Sapiens
YKSPVILL

SEQ ID NO: 149941 - protein, 8 aa, Homo Sapiens
YKYVGMIL

SEQ ID NO: 149942 - protein, 8 aa, Homo Sapiens
YRAPEIML

SEQ ID NO: 149943 - protein, 8 aa, Homo Sapiens
YRGPANGF

SEQ ID NO: 149944 - protein, 8 aa, Homo Sapiens
YRGPCHTY

SEQ ID NO: 149945 - protein, 8 aa, Homo Sapiens
YRGPSHTY

SEQ ID NO: 149946 - protein, 8 aa, Homo Sapiens
YRPPELLL

SEQ ID NO: 149947 - protein, 8 aa, Homo Sapiens
YRRVFEEY

SEQ ID NO: 149948 - protein, 8 aa, Homo Sapiens
YYGNISHF

SEQ ID NO: 149949 - protein, 8 aa, Homo Sapiens
YYINHPLY

SEQ ID NO: 149950 - protein, 8 aa, Homo Sapiens
YYINSPEL

SEQ ID NO: 149951 - protein, 8 aa, Homo Sapiens
YYNSHDSL

SEQ ID NO: 149952 - protein, 8 aa, Homo Sapiens
YYNTITNF

SEQ ID NO: 149953 - protein, 8 aa, Homo Sapiens
YYTEFPTV

SEQ ID NO: 149954 - protein, 9 aa, Homo Sapiens
AANPHSFVF

SEQ ID NO: 149955 - protein, 9 aa, Homo Sapiens
AAPAYSRAL

SEQ ID NO: 149956 - protein, 9 aa, Homo Sapiens
AAPEGAGAL

SEQ ID NO: 149957 - protein, 9 aa, Homo Sapiens
AAPTAQKSL

SEQ ID NO: 149958 - protein, 9 aa, Homo Sapiens
AAPTSAAAL

SEQ ID NO: 149959 - protein, 9 aa, Homo Sapiens
AAPVPTTTL

SEQ ID NO: 149960 - protein, 9 aa, Homo Sapiens
AAQDRDQIY

SEQ ID NO: 149961 - protein, 9 aa, Homo Sapiens
AFKDVSFSL

SEQ ID NO: 149962 - protein, 9 aa, Homo Sapiens
AKADVPYIL

SEQ ID NO: 149963 - protein, 9 aa, Homo Sapiens
AKAGVYYVF

SEQ ID NO: 149964 - protein, 9 aa, Homo Sapiens
AKAPPTACY

SEQ ID NO: 149965 - protein, 9 aa, Homo Sapiens
AKFSLPVSL

SEQ ID NO: 149966 - protein, 9 aa, Homo Sapiens
AKNNVVINY

SEQ ID NO: 149967 - protein, 9 aa, Homo Sapiens
AKQDVVLNY

SEQ ID NO: 149968 - protein, 9 aa, Homo Sapiens
AKSDVTNQL

SEQ ID NO: 149969 - protein, 9 aa, Homo Sapiens
AQVTVVVAQ

SEQ ID NO: 149970 - protein, 9 aa, Homo Sapiens
ARADFQKVL

SEQ ID NO: 149971 - protein, 9 aa, Homo Sapiens
ARADSYYEY

SEQ ID NO: 149972 - protein, 9 aa, Homo Sapiens
ARAGVSQVL

SEQ ID NO: 149973 - protein, 9 aa, Homo Sapiens
ARAHSIQIM

SEQ ID NO: 149974 - protein, 9 aa, Homo Sapiens
ARAPGTRTL

SEQ ID NO: 149975 - protein, 9 aa, Homo Sapiens
ARAYEPQEL

SEQ ID NO: 149976 - protein, 9 aa, Homo Sapiens
ARCDFALFL

SEQ ID NO: 149977 - protein, 9 aa, Homo Sapiens
ARDDTHYLL

SEQ ID NO: 149978 - protein, 9 aa, Homo Sapiens
ARDPGARVL

SEQ ID NO: 149979 - protein, 9 aa, Homo Sapiens
ARFGSVNEL

SEQ ID NO: 149980 - protein, 9 aa, Homo Sapiens
ARFLFTTGF

SEQ ID NO: 149981 - protein, 9 aa, Homo Sapiens
ARGAFSEEY

SEQ ID NO: 149982 - protein, 9 aa, Homo Sapiens
ARGLLEEQY

SEQ ID NO: 149983 - protein, 9 aa, Homo Sapiens
ARHEHQVML

SEQ ID NO: 149984 - protein, 9 aa, Homo Sapiens
ARHFLHHYY

SEQ ID NO: 149985 - protein, 9 aa, Homo Sapiens
ARHVVAVVL

SEQ ID NO: 149986 - protein, 9 aa, Homo Sapiens
ARHVVKVEY

SEQ ID NO: 149987 - protein, 9 aa, Homo Sapiens
ARIPFYGSY

SEQ ID NO: 149988 - protein, 9 aa, Homo Sapiens
ARIPLNPVL

SEQ ID NO: 149989 - protein, 9 aa, Homo Sapiens
ARLDLPYEL

SEQ ID NO: 149990 - protein, 9 aa, Homo Sapiens
ARLTEGCSF

SEQ ID NO: 149991 - protein, 9 aa, Homo Sapiens
ARNDYLLTL

SEQ ID NO: 149992 - protein, 9 aa, Homo Sapiens
ARNERIYVY

SEQ ID NO: 149993 - protein, 9 aa, Homo Sapiens
ARNPSTVCL

SEQ ID NO: 149994 - protein, 9 aa, Homo Sapiens
ARNTVTQVL

SEQ ID NO: 149995 - protein, 9 aa, Homo Sapiens
ARPDATKVL

SEQ ID NO: 149996 - protein, 9 aa, Homo Sapiens
ARPDINLIL

SEQ ID NO: 149997 - protein, 9 aa, Homo Sapiens
ARPDNWFCY

SEQ ID NO: 149998 - protein, 9 aa, Homo Sapiens
ARPEEPIAF

SEQ ID NO: 149999 - protein, 9 aa, Homo Sapiens
ARPELLEVF

SEQ ID NO: 150000 - protein, 9 aa, Homo Sapiens
ARPEPATGY

SEQ ID NO: 150001 - protein, 9 aa, Homo Sapiens
ARPERPMAF

SEQ ID NO: 150002 - protein, 9 aa, Homo Sapiens
ARPGCIIAL

SEQ ID NO: 150003 - protein, 9 aa, Homo Sapiens
ARPGCIIEL

SEQ ID NO: 150004 - protein, 9 aa, Homo Sapiens
ARPLEGTSF

SEQ ID NO: 150005 - protein, 9 aa, Homo Sapiens
ARPLVQTIF

SEQ ID NO: 150006 - protein, 9 aa, Homo Sapiens
ARPPAAPEL

SEQ ID NO: 150007 - protein, 9 aa, Homo Sapiens
ARPPDPLCL

SEQ ID NO: 150008 - protein, 9 aa, Homo Sapiens
ARPPFVICV

SEQ ID NO: 150009 - protein, 9 aa, Homo Sapiens
ARPPPLPGL

SEQ ID NO: 150010 - protein, 9 aa, Homo Sapiens
ARPPSVDSL

SEQ ID NO: 150011 - protein, 9 aa, Homo Sapiens
ARPPVLAKL

SEQ ID NO: 150012 - protein, 9 aa, Homo Sapiens
ARPSPCYQL

SEQ ID NO: 150013 - protein, 9 aa, Homo Sapiens
ARPSVLWCY

SEQ ID NO: 150014 - protein, 9 aa, Homo Sapiens
ARPTAPFTL

SEQ ID NO: 150015 - protein, 9 aa, Homo Sapiens
ARPVLLQVY

SEQ ID NO: 150016 - protein, 9 aa, Homo Sapiens
ARRENILVM

SEQ ID NO: 150017 - protein, 9 aa, Homo Sapiens
ARSLKVFEL

SEQ ID NO: 150018 - protein, 9 aa, Homo Sapiens
ARSRFPQTF

SEQ ID NO: 150019 - protein, 9 aa, Homo Sapiens
ARTVFCMQL

SEQ ID NO: 150020 - protein, 9 aa, Homo Sapiens
ARVIFITEY

SEQ ID NO: 150021 - protein, 9 aa, Homo Sapiens
ARVPHSLDL

SEQ ID NO: 150022 - protein, 9 aa, Homo Sapiens
ARVPSSLAY

SEQ ID NO: 150023 - protein, 9 aa, Homo Sapiens
ARYPKKIHY

SEQ ID NO: 150024 - protein, 9 aa, Homo Sapiens
AYAGTGIQY

SEQ ID NO: 150025 - protein, 9 aa, Homo Sapiens
AYFPYFITY

SEQ ID NO: 150026 - protein, 9 aa, Homo Sapiens
AYHELAQVY

SEQ ID NO: 150027 - protein, 9 aa, Homo Sapiens
AYHGLTVPL

SEQ ID NO: 150028 - protein, 9 aa, Homo Sapiens
AYHTQTTPL

SEQ ID NO: 150029 - protein, 9 aa, Homo Sapiens
AYIPTPIYF

SEQ ID NO: 150030 - protein, 9 aa, Homo Sapiens
AYKDAIYVF

SEQ ID NO: 150031 - protein, 9 aa, Homo Sapiens
AYKDFLWFF

SEQ ID NO: 150032 - protein, 9 aa, Homo Sapiens
AYKEPCFVY

SEQ ID NO: 150033 - protein, 9 aa, Homo Sapiens
AYKEPPLAL

SEQ ID NO: 150034 - protein, 9 aa, Homo Sapiens
AYKNVKFVL

SEQ ID NO: 150035 - protein, 9 aa, Homo Sapiens
AYKPPGFSL

SEQ ID NO: 150036 - protein, 9 aa, Homo Sapiens
AYLEAHETF

SEQ ID NO: 150037 - protein, 9 aa, Homo Sapiens
AYLESFYKF

SEQ ID NO: 150038 - protein, 9 aa, Homo Sapiens
AYLPVNESF

SEQ ID NO: 150039 - protein, 9 aa, Homo Sapiens
AYPDKNFTL

SEQ ID NO: 150040 - protein, 9 aa, Homo Sapiens
AYPEIVAVY

SEQ ID NO: 150041 - protein, 9 aa, Homo Sapiens
AYPEVRIVL

SEQ ID NO: 150042 - protein, 9 aa, Homo Sapiens
AYPEYLITF

SEQ ID NO: 150043 - protein, 9 aa, Homo Sapiens
AYPEYLITY

SEQ ID NO: 150044 - protein, 9 aa, Homo Sapiens
AYPPPAPAY

SEQ ID NO: 150045 - protein, 9 aa, Homo Sapiens
AYPTYPVGF

SEQ ID NO: 150046 - protein, 9 aa, Homo Sapiens
AYQEAVRTL

SEQ ID NO: 150047 - protein, 9 aa, Homo Sapiens
AYQELLQHY

SEQ ID NO: 150048 - protein, 9 aa, Homo Sapiens
AYRDARVEL

SEQ ID NO: 150049 - protein, 9 aa, Homo Sapiens
AYRKLALKY

SEQ ID NO: 150050 - protein, 9 aa, Homo Sapiens
AYRLSVEIY

SEQ ID NO: 150051 - protein, 9 aa, Homo Sapiens
AYRQGHFTY

SEQ ID NO: 150052 - protein, 9 aa, Homo Sapiens
AYSDVAKRL

SEQ ID NO: 150053 - protein, 9 aa, Homo Sapiens
AYSEAIFEL

SEQ ID NO: 150054 - protein, 9 aa, Homo Sapiens
AYSSYVHQY

SEQ ID NO: 150055 - protein, 9 aa, Homo Sapiens
AYTPFHAVL

SEQ ID NO: 150056 - protein, 9 aa, Homo Sapiens
CRFQIVQVL

SEQ ID NO: 150057 - protein, 9 aa, Homo Sapiens
CRHANIVAY

SEQ ID NO: 150058 - protein, 9 aa, Homo Sapiens
CRQPQPFLL

SEQ ID NO: 150059 - protein, 9 aa, Homo Sapiens
CYGGTAAVF

SEQ ID NO: 150060 - protein, 9 aa, Homo Sapiens
CYILRPWAY

SEQ ID NO: 150061 - protein, 9 aa, Homo Sapiens
CYNPLLDSF

SEQ ID NO: 150062 - protein, 9 aa, Homo Sapiens
CYSPKPSVY

SEQ ID NO: 150063 - protein, 9 aa, Homo Sapiens
ERNPAVYNF

SEQ ID NO: 150064 - protein, 9 aa, Homo Sapiens
ERPPNPIEF

SEQ ID NO: 150065 - protein, 9 aa, Homo Sapiens
ERVPFILTY

SEQ ID NO: 150066 - protein, 9 aa, Homo Sapiens
EYPDLIHIY

SEQ ID NO: 150067 - protein, 9 aa, Homo Sapiens
FAPYERRAM

SEQ ID NO: 150068 - protein, 9 aa, Homo Sapiens
FFKELIQEF

SEQ ID NO: 150069 - protein, 9 aa, Homo Sapiens
FFMPGFAPL

SEQ ID NO: 150070 - protein, 9 aa, Homo Sapiens
FKAPITSEF

SEQ ID NO: 150071 - protein, 9 aa, Homo Sapiens
FKGQNPFEL

SEQ ID NO: 150072 - protein, 9 aa, Homo Sapiens
FKIHQPYTL

SEQ ID NO: 150073 - protein, 9 aa, Homo Sapiens
FKNPEPELL

SEQ ID NO: 150074 - protein, 9 aa, Homo Sapiens
FKNPIIEKY

SEQ ID NO: 150075 - protein, 9 aa, Homo Sapiens
FKPETYWVL

SEQ ID NO: 150076 - protein, 9 aa, Homo Sapiens
FKSNVTKTM

SEQ ID NO: 150077 - protein, 9 aa, Homo Sapiens
FKSPVKTIR

SEQ ID NO: 150078 - protein, 9 aa, Homo Sapiens
FRDAFTQEL

SEQ ID NO: 150079 - protein, 9 aa, Homo Sapiens
FRFENVNGY

SEQ ID NO: 150080 - protein, 9 aa, Homo Sapiens
FRFQPFESY

SEQ ID NO: 150081 - protein, 9 aa, Homo Sapiens
FRGDLCYLL

SEQ ID NO: 150082 - protein, 9 aa, Homo Sapiens
FRGNTPLHL

SEQ ID NO: 150083 - protein, 9 aa, Homo Sapiens
FRGPTVSNI

SEQ ID NO: 150084 - protein, 9 aa, Homo Sapiens
FRGPVVPAF

SEQ ID NO: 150085 - protein, 9 aa, Homo Sapiens
FRHEVGYVL

SEQ ID NO: 150086 - protein, 9 aa, Homo Sapiens
FRHEVMYSF

SEQ ID NO: 150087 - protein, 9 aa, Homo Sapiens
FRHLIEFTY

SEQ ID NO: 150088 - protein, 9 aa, Homo Sapiens
FRHNPYTAF

SEQ ID NO: 150089 - protein, 9 aa, Homo Sapiens
FRHPHIIKL

SEQ ID NO: 150090 - protein, 9 aa, Homo Sapiens
FRKSMVEHY

SEQ ID NO: 150091 - protein, 9 aa, Homo Sapiens
FRKSTVEHF

SEQ ID NO: 150092 - protein, 9 aa, Homo Sapiens
FRKVDVDEY

SEQ ID NO: 150093 - protein, 9 aa, Homo Sapiens
FRLDTPLYF

SEQ ID NO: 150094 - protein, 9 aa, Homo Sapiens
FRLEQGYEL

SEQ ID NO: 150095 - protein, 9 aa, Homo Sapiens
FRLLQETLY

SEQ ID NO: 150096 - protein, 9 aa, Homo Sapiens
FRLLQETMY

SEQ ID NO: 150097 - protein, 9 aa, Homo Sapiens
FRLPTAEVM

SEQ ID NO: 150098 - protein, 9 aa, Homo Sapiens
FRMPVLREY

SEQ ID NO: 150099 - protein, 9 aa, Homo Sapiens
FRNERAIRF

SEQ ID NO: 150100 - protein, 9 aa, Homo Sapiens
FRNFFSNMF

SEQ ID NO: 150101 - protein, 9 aa, Homo Sapiens
FRNIPGITL

SEQ ID NO: 150102 - protein, 9 aa, Homo Sapiens
FRNLHTIVL

SEQ ID NO: 150103 - protein, 9 aa, Homo Sapiens
FRNPKTSFY

SEQ ID NO: 150104 - protein, 9 aa, Homo Sapiens
FRPALPVSY

SEQ ID NO: 150105 - protein, 9 aa, Homo Sapiens
FRPDEPYYY

SEQ ID NO: 150106 - protein, 9 aa, Homo Sapiens
FRPECFSAF

SEQ ID NO: 150107 - protein, 9 aa, Homo Sapiens
FRPEHVSRL

SEQ ID NO: 150108 - protein, 9 aa, Homo Sapiens
FRPEWQSVY

SEQ ID NO: 150109 - protein, 9 aa, Homo Sapiens
FRPEWTQRY

SEQ ID NO: 150110 - protein, 9 aa, Homo Sapiens
FRPLDVSLY

SEQ ID NO: 150111 - protein, 9 aa, Homo Sapiens
FRPLYTHEY

SEQ ID NO: 150112 - protein, 9 aa, Homo Sapiens
FRPPGTSDL

SEQ ID NO: 150113 - protein, 9 aa, Homo Sapiens
FRPPITQEI

SEQ ID NO: 150114 - protein, 9 aa, Homo Sapiens
FRPPNPWTM

SEQ ID NO: 150115 - protein, 9 aa, Homo Sapiens
FRPPTRAEL

SEQ ID NO: 150116 - protein, 9 aa, Homo Sapiens
FRPQQTEIY

SEQ ID NO: 150117 - protein, 9 aa, Homo Sapiens
FRPQSGRVL

SEQ ID NO: 150118 - protein, 9 aa, Homo Sapiens
FRQDFHSEM

SEQ ID NO: 150119 - protein, 9 aa, Homo Sapiens
FRQEYLDTL

SEQ ID NO: 150120 - protein, 9 aa, Homo Sapiens
FRQIIAVVL

SEQ ID NO: 150121 - protein, 9 aa, Homo Sapiens
FRQLPARTL

SEQ ID NO: 150122 - protein, 9 aa, Homo Sapiens
FRQPVVDTF

SEQ ID NO: 150123 - protein, 9 aa, Homo Sapiens
FRQQRPLEF

SEQ ID NO: 150124 - protein, 9 aa, Homo Sapiens
FRRPVLQVL

SEQ ID NO: 150125 - protein, 9 aa, Homo Sapiens
FRSDISEEL

SEQ ID NO: 150126 - protein, 9 aa, Homo Sapiens
FRSDNSFSF

SEQ ID NO: 150127 - protein, 9 aa, Homo Sapiens
FRSDSSFNF

SEQ ID NO: 150128 - protein, 9 aa, Homo Sapiens
FRSEPALYF

SEQ ID NO: 150129 - protein, 9 aa, Homo Sapiens
FRSFVVSKF

SEQ ID NO: 150130 - protein, 9 aa, Homo Sapiens
FRSIRPLSY

SEQ ID NO: 150131 - protein, 9 aa, Homo Sapiens
FRSPLARQL

SEQ ID NO: 150132 - protein, 9 aa, Homo Sapiens
FRTDGHPVM

SEQ ID NO: 150133 - protein, 9 aa, Homo Sapiens
FRTEFNLMY

SEQ ID NO: 150134 - protein, 9 aa, Homo Sapiens
FRTPFPLAF

SEQ ID NO: 150135 - protein, 9 aa, Homo Sapiens
FRVDYILSV

SEQ ID NO: 150136 - protein, 9 aa, Homo Sapiens
FRVHLQYEF

SEQ ID NO: 150137 - protein, 9 aa, Homo Sapiens
FRVHTVMTL

SEQ ID NO: 150138 - protein, 9 aa, Homo Sapiens
FRVPFIYGH

SEQ ID NO: 150139 - protein, 9 aa, Homo Sapiens
FRVPTANVS

SEQ ID NO: 150140 - protein, 9 aa, Homo Sapiens
FRYTAGTPY

SEQ ID NO: 150141 - protein, 9 aa, Homo Sapiens
FSNPYSIEY

SEQ ID NO: 150142 - protein, 9 aa, Homo Sapiens
FYDDKKYTY

SEQ ID NO: 150143 - protein, 9 aa, Homo Sapiens
FYFALRDTL

SEQ ID NO: 150144 - protein, 9 aa, Homo Sapiens
FYGSHPWHW

SEQ ID NO: 150145 - protein, 9 aa, Homo Sapiens
FYHEAVVLF

SEQ ID NO: 150146 - protein, 9 aa, Homo Sapiens
FYHPETTQL

SEQ ID NO: 150147 - protein, 9 aa, Homo Sapiens
FYMDTSHLF

SEQ ID NO: 150148 - protein, 9 aa, Homo Sapiens
FYNERVVIM

SEQ ID NO: 150149 - protein, 9 aa, Homo Sapiens
FYNEYVREL

SEQ ID NO: 150150 - protein, 9 aa, Homo Sapiens
FYNLIHPEY

SEQ ID NO: 150151 - protein, 9 aa, Homo Sapiens
FYPLFVHMY

SEQ ID NO: 150152 - protein, 9 aa, Homo Sapiens
FYPPPRITL

SEQ ID NO: 150153 - protein, 9 aa, Homo Sapiens
FYQPKIQQF

SEQ ID NO: 150154 - protein, 9 aa, Homo Sapiens
FYQPTCIVL

SEQ ID NO: 150155 - protein, 9 aa, Homo Sapiens
FYQRFPLSF

SEQ ID NO: 150156 - protein, 9 aa, Homo Sapiens
FYRPHTITL

SEQ ID NO: 150157 - protein, 9 aa, Homo Sapiens
FYRPLAPEL

SEQ ID NO: 150158 - protein, 9 aa, Homo Sapiens
FYRVTTEQY

SEQ ID NO: 150159 - protein, 9 aa, Homo Sapiens
FYSEVHPHY

SEQ ID NO: 150160 - protein, 9 aa, Homo Sapiens
FYSGSPTSY

SEQ ID NO: 150161 - protein, 9 aa, Homo Sapiens
FYVDTVRAF

SEQ ID NO: 150162 - protein, 9 aa, Homo Sapiens
FYVPFAKAL

SEQ ID NO: 150163 - protein, 9 aa, Homo Sapiens
GAPVAAAAL

SEQ ID NO: 150164 - protein, 9 aa, Homo Sapiens
GRAKTPVTL

SEQ ID NO: 150165 - protein, 9 aa, Homo Sapiens
GRAPGGLSL

SEQ ID NO: 150166 - protein, 9 aa, Homo Sapiens
GRFEDVYQL

SEQ ID NO: 150167 - protein, 9 aa, Homo Sapiens
GRGPVLGPM

SEQ ID NO: 150168 - protein, 9 aa, Homo Sapiens
GRHGVFLEL

SEQ ID NO: 150169 - protein, 9 aa, Homo Sapiens
GRNPFVHEL

SEQ ID NO: 150170 - protein, 9 aa, Homo Sapiens
GRPCKIVEM

SEQ ID NO: 150171 - protein, 9 aa, Homo Sapiens
GRPETIFQL

SEQ ID NO: 150172 - protein, 9 aa, Homo Sapiens
GRPGPIGPA

SEQ ID NO: 150173 - protein, 9 aa, Homo Sapiens
GRPLFPHVL

SEQ ID NO: 150174 - protein, 9 aa, Homo Sapiens
GRQIKPYTL

SEQ ID NO: 150175 - protein, 9 aa, Homo Sapiens
GRSCIILEF

SEQ ID NO: 150176 - protein, 9 aa, Homo Sapiens
GRSEYVEKF

SEQ ID NO: 150177 - protein, 9 aa, Homo Sapiens
GRYQVSWSL

SEQ ID NO: 150178 - protein, 9 aa, Homo Sapiens
GSLRVLVLR

SEQ ID NO: 150179 - protein, 9 aa, Homo Sapiens
GYFLRAWNY

SEQ ID NO: 150180 - protein, 9 aa, Homo Sapiens
HAPFTATSL

SEQ ID NO: 150181 - protein, 9 aa, Homo Sapiens
HGPGPVGAL

SEQ ID NO: 150182 - protein, 9 aa, Homo Sapiens
HLPSGVKSL

SEQ ID NO: 150183 - protein, 9 aa, Homo Sapiens
HRAEVTEEF

SEQ ID NO: 150184 - protein, 9 aa, Homo Sapiens
HRAVFPIYL

SEQ ID NO: 150185 - protein, 9 aa, Homo Sapiens
HRFYMFHSF

SEQ ID NO: 150186 - protein, 9 aa, Homo Sapiens
HRFYMHHSF

SEQ ID NO: 150187 - protein, 9 aa, Homo Sapiens
HRGEVPCTV

SEQ ID NO: 150188 - protein, 9 aa, Homo Sapiens
HRGPDAFRF

SEQ ID NO: 150189 - protein, 9 aa, Homo Sapiens
HRHPDAFYL

SEQ ID NO: 150190 - protein, 9 aa, Homo Sapiens
HRKDYINAY

SEQ ID NO: 150191 - protein, 9 aa, Homo Sapiens
HRKPMFNIH

SEQ ID NO: 150192 - protein, 9 aa, Homo Sapiens
HRLPPVTSF

SEQ ID NO: 150193 - protein, 9 aa, Homo Sapiens
HRNEVTVEL

SEQ ID NO: 150194 - protein, 9 aa, Homo Sapiens
HRNFKPVVY

SEQ ID NO: 150195 - protein, 9 aa, Homo Sapiens
HRNGGLITL

SEQ ID NO: 150196 - protein, 9 aa, Homo Sapiens
HRNLIEIGY

SEQ ID NO: 150197 - protein, 9 aa, Homo Sapiens
HRNPLPEYL

SEQ ID NO: 150198 - protein, 9 aa, Homo Sapiens
HRPEATPSM

SEQ ID NO: 150199 - protein, 9 aa, Homo Sapiens
HRPEFSSCL

SEQ ID NO: 150200 - protein, 9 aa, Homo Sapiens
HRPGIVVDY

SEQ ID NO: 150201 - protein, 9 aa, Homo Sapiens
HRPSHFLNF

SEQ ID NO: 150202 - protein, 9 aa, Homo Sapiens
HRQGFSYDY

SEQ ID NO: 150203 - protein, 9 aa, Homo Sapiens
HRSWWVYTL

SEQ ID NO: 150204 - protein, 9 aa, Homo Sapiens
HRTDLNPIL

SEQ ID NO: 150205 - protein, 9 aa, Homo Sapiens
HRVAQAWEL

SEQ ID NO: 150206 - protein, 9 aa, Homo Sapiens
HRWEVCLTM

SEQ ID NO: 150207 - protein, 9 aa, Homo Sapiens
HRYENVSIL

SEQ ID NO: 150208 - protein, 9 aa, Homo Sapiens
HRYEVVTEL

SEQ ID NO: 150209 - protein, 9 aa, Homo Sapiens
HRYPAVHVY

SEQ ID NO: 150210 - protein, 9 aa, Homo Sapiens
HYGQSGISM

SEQ ID NO: 150211 - protein, 9 aa, Homo Sapiens
HYKPTPLYF

SEQ ID NO: 150212 - protein, 9 aa, Homo Sapiens
HYLPVKIIL

SEQ ID NO: 150213 - protein, 9 aa, Homo Sapiens
HYPDFHQEL

SEQ ID NO: 150214 - protein, 9 aa, Homo Sapiens
HYPDYSWSA

SEQ ID NO: 150215 - protein, 9 aa, Homo Sapiens
HYPPVQVLF

SEQ ID NO: 150216 - protein, 9 aa, Homo Sapiens
HYRPPEVIL

SEQ ID NO: 150217 - protein, 9 aa, Homo Sapiens
HYSPIYLSF

SEQ ID NO: 150218 - protein, 9 aa, Homo Sapiens
HYVEKPSTF

SEQ ID NO: 150219 - protein, 9 aa, Homo Sapiens
HYYSITINY

SEQ ID NO: 150220 - protein, 9 aa, Homo Sapiens
IAPETRRSI

SEQ ID NO: 150221 - protein, 9 aa, Homo Sapiens
IAPGVTHEL

SEQ ID NO: 150222 - protein, 9 aa, Homo Sapiens
IHPVVITSF

SEQ ID NO: 150223 - protein, 9 aa, Homo Sapiens
IHSPVVNEL

SEQ ID NO: 150224 - protein, 9 aa, Homo Sapiens
IKADHVSTY

SEQ ID NO: 150225 - protein, 9 aa, Homo Sapiens
IKPETILYY

SEQ ID NO: 150226 - protein, 9 aa, Homo Sapiens
IKSDVHLNF

SEQ ID NO: 150227 - protein, 9 aa, Homo Sapiens
ILTERGYSF

SEQ ID NO: 150228 - protein, 9 aa, Homo Sapiens
IPPLVCNPE

SEQ ID NO: 150229 - protein, 9 aa, Homo Sapiens
IRGPTQHEL

SEQ ID NO: 150230 - protein, 9 aa, Homo Sapiens
IRKPYIWEY

SEQ ID NO: 150231 - protein, 9 aa, Homo Sapiens
IRMTYIKEL

SEQ ID NO: 150232 - protein, 9 aa, Homo Sapiens
IRNDYYLNL

SEQ ID NO: 150233 - protein, 9 aa, Homo Sapiens
IRPDNMSEY

SEQ ID NO: 150234 - protein, 9 aa, Homo Sapiens
IRPEHVLRL

SEQ ID NO: 150235 - protein, 9 aa, Homo Sapiens
IRPEIHENY

SEQ ID NO: 150236 - protein, 9 aa, Homo Sapiens
IRPENVIIY

SEQ ID NO: 150237 - protein, 9 aa, Homo Sapiens
IRPEYAWIV

SEQ ID NO: 150238 - protein, 9 aa, Homo Sapiens
IRPGTAFEL

SEQ ID NO: 150239 - protein, 9 aa, Homo Sapiens
IRPQVVTTF

SEQ ID NO: 150240 - protein, 9 aa, Homo Sapiens
IRQDNERVL

SEQ ID NO: 150241 - protein, 9 aa, Homo Sapiens
IRSSYIRVL

SEQ ID NO: 150242 - protein, 9 aa, Homo Sapiens
IRTDFNILY

SEQ ID NO: 150243 - protein, 9 aa, Homo Sapiens
IRVDKITEY

SEQ ID NO: 150244 - protein, 9 aa, Homo Sapiens
IVPGNVKSL

SEQ ID NO: 150245 - protein, 9 aa, Homo Sapiens
IYAPKLQEF

SEQ ID NO: 150246 - protein, 9 aa, Homo Sapiens
IYATRLIQM

SEQ ID NO: 150247 - protein, 9 aa, Homo Sapiens
IYAVNGIAF

SEQ ID NO: 150248 - protein, 9 aa, Homo Sapiens
IYGEKTYAF

SEQ ID NO: 150249 - protein, 9 aa, Homo Sapiens
IYKDLPFET

SEQ ID NO: 150250 - protein, 9 aa, Homo Sapiens
IYKELLISL

SEQ ID NO: 150251 - protein, 9 aa, Homo Sapiens
IYPDSFTVL

SEQ ID NO: 150252 - protein, 9 aa, Homo Sapiens
IYPEVVHMF

SEQ ID NO: 150253 - protein, 9 aa, Homo Sapiens
IYPGHGMMF

SEQ ID NO: 150254 - protein, 9 aa, Homo Sapiens
IYPVNAISF

SEQ ID NO: 150255 - protein, 9 aa, Homo Sapiens
IYPYVIQEL

SEQ ID NO: 150256 - protein, 9 aa, Homo Sapiens
IYQELVTKY

SEQ ID NO: 150257 - protein, 9 aa, Homo Sapiens
IYYFKANVF

SEQ ID NO: 150258 - protein, 9 aa, Homo Sapiens
KAFARPWSL

SEQ ID NO: 150259 - protein, 9 aa, Homo Sapiens
KAPGSTSNL

SEQ ID NO: 150260 - protein, 9 aa, Homo Sapiens
KAPVTKVAA

SEQ ID NO: 150261 - protein, 9 aa, Homo Sapiens
KKADCTITM

SEQ ID NO: 150262 - protein, 9 aa, Homo Sapiens
KKIPGIYVL

SEQ ID NO: 150263 - protein, 9 aa, Homo Sapiens
KKNPFHLEL

SEQ ID NO: 150264 - protein, 9 aa, Homo Sapiens
KKSDPVVSY

SEQ ID NO: 150265 - protein, 9 aa, Homo Sapiens
KKTEVVITL

SEQ ID NO: 150266 - protein, 9 aa, Homo Sapiens
KRADLQSTF

SEQ ID NO: 150267 - protein, 9 aa, Homo Sapiens
KRCDIILVM

SEQ ID NO: 150268 - protein, 9 aa, Homo Sapiens
KRFGKAYNL

SEQ ID NO: 150269 - protein, 9 aa, Homo Sapiens
KRFSGTVRL

SEQ ID NO: 150270 - protein, 9 aa, Homo Sapiens
KRGDVIYIL

SEQ ID NO: 150271 - protein, 9 aa, Homo Sapiens
KRHCFDVNY

SEQ ID NO: 150272 - protein, 9 aa, Homo Sapiens
KRIDIIHNL

SEQ ID NO: 150273 - protein, 9 aa, Homo Sapiens
KRINWRTVL

SEQ ID NO: 150274 - protein, 9 aa, Homo Sapiens
KRLDVEFVL

SEQ ID NO: 150275 - protein, 9 aa, Homo Sapiens
KRNDYVHAL

SEQ ID NO: 150276 - protein, 9 aa, Homo Sapiens
KRPAGPLVL

SEQ ID NO: 150277 - protein, 9 aa, Homo Sapiens
KRPDTTESL

SEQ ID NO: 150278 - protein, 9 aa, Homo Sapiens
KRPVFIFEW

SEQ ID NO: 150279 - protein, 9 aa, Homo Sapiens
KRPVGGFLL

SEQ ID NO: 150280 - protein, 9 aa, Homo Sapiens
KRQEAIFEL

SEQ ID NO: 150281 - protein, 9 aa, Homo Sapiens
KRQEVIYEL

SEQ ID NO: 150282 - protein, 9 aa, Homo Sapiens
KRVEDAYIL

SEQ ID NO: 150283 - protein, 9 aa, Homo Sapiens
KRVFPKWTY

SEQ ID NO: 150284 - protein, 9 aa, Homo Sapiens
KRVTWIVEF

SEQ ID NO: 150285 - protein, 9 aa, Homo Sapiens
KRYIFADAY

SEQ ID NO: 150286 - protein, 9 aa, Homo Sapiens
KRYKSIVKY

SEQ ID NO: 150287 - protein, 9 aa, Homo Sapiens
KYAGSALQY

SEQ ID NO: 150288 - protein, 9 aa, Homo Sapiens
KYFAKHPRL

SEQ ID NO: 150289 - protein, 9 aa, Homo Sapiens
KYFDEHYEY

SEQ ID NO: 150290 - protein, 9 aa, Homo Sapiens
KYFEKQFEL

SEQ ID NO: 150291 - protein, 9 aa, Homo Sapiens
KYFGGVLEY

SEQ ID NO: 150292 - protein, 9 aa, Homo Sapiens
KYFLQQWEL

SEQ ID NO: 150293 - protein, 9 aa, Homo Sapiens
KYFLRGYRY

SEQ ID NO: 150294 - protein, 9 aa, Homo Sapiens
KYGNQLVRL

SEQ ID NO: 150295 - protein, 9 aa, Homo Sapiens
KYHGFGNVH

SEQ ID NO: 150296 - protein, 9 aa, Homo Sapiens
KYIGYARQY

SEQ ID NO: 150297 - protein, 9 aa, Homo Sapiens
KYKDAIHFY

SEQ ID NO: 150298 - protein, 9 aa, Homo Sapiens
KYKDIYTEL

SEQ ID NO: 150299 - protein, 9 aa, Homo Sapiens
KYKDNPFSL

SEQ ID NO: 150300 - protein, 9 aa, Homo Sapiens
KYKERGTVL

SEQ ID NO: 150301 - protein, 9 aa, Homo Sapiens
KYMDVQFDF

SEQ ID NO: 150302 - protein, 9 aa, Homo Sapiens
KYNACILEY

SEQ ID NO: 150303 - protein, 9 aa, Homo Sapiens
KYPDVIQEL

SEQ ID NO: 150304 - protein, 9 aa, Homo Sapiens
KYPEGIRKY

SEQ ID NO: 150305 - protein, 9 aa, Homo Sapiens
KYPENFFLL

SEQ ID NO: 150306 - protein, 9 aa, Homo Sapiens
KYPHYFPVM

SEQ ID NO: 150307 - protein, 9 aa, Homo Sapiens
KYPPVNRKY

SEQ ID NO: 150308 - protein, 9 aa, Homo Sapiens
KYPSPFFVF

SEQ ID NO: 150309 - protein, 9 aa, Homo Sapiens
KYPSYIHKM

SEQ ID NO: 150310 - protein, 9 aa, Homo Sapiens
KYQDVYVEL

SEQ ID NO: 150311 - protein, 9 aa, Homo Sapiens
KYREMYEEF

SEQ ID NO: 150312 - protein, 9 aa, Homo Sapiens
KYRPVCIHL

SEQ ID NO: 150313 - protein, 9 aa, Homo Sapiens
LKSDIYLEY

SEQ ID NO: 150314 - protein, 9 aa, Homo Sapiens
LKSPFAYCM

SEQ ID NO: 150315 - protein, 9 aa, Homo Sapiens
LRADLAEEY

SEQ ID NO: 150316 - protein, 9 aa, Homo Sapiens
LRDHSVRVL

SEQ ID NO: 150317 - protein, 9 aa, Homo Sapiens
LRHDRPYTL

SEQ ID NO: 150318 - protein, 9 aa, Homo Sapiens
LRHPVCVEL

SEQ ID NO: 150319 - protein, 9 aa, Homo Sapiens
LRNHMAVAF

SEQ ID NO: 150320 - protein, 9 aa, Homo Sapiens
LRNKVIIEY

SEQ ID NO: 150321 - protein, 9 aa, Homo Sapiens
LRNQSVFNF

SEQ ID NO: 150322 - protein, 9 aa, Homo Sapiens
LRPAVGYEL

SEQ ID NO: 150323 - protein, 9 aa, Homo Sapiens
LRPGIHHSL

SEQ ID NO: 150324 - protein, 9 aa, Homo Sapiens
LRPPERQAL

SEQ ID NO: 150325 - protein, 9 aa, Homo Sapiens
LRPPIMIMM

SEQ ID NO: 150326 - protein, 9 aa, Homo Sapiens
LRPPYQISM

SEQ ID NO: 150327 - protein, 9 aa, Homo Sapiens
LRPSTSRSL

SEQ ID NO: 150328 - protein, 9 aa, Homo Sapiens
LRSDSYVEL

SEQ ID NO: 150329 - protein, 9 aa, Homo Sapiens
LRSGVIVRL

SEQ ID NO: 150330 - protein, 9 aa, Homo Sapiens
LSPTPATAL

SEQ ID NO: 150331 - protein, 9 aa, Homo Sapiens
LYHEHIIKY

SEQ ID NO: 150332 - protein, 9 aa, Homo Sapiens
LYHYYIMEL

SEQ ID NO: 150333 - protein, 9 aa, Homo Sapiens
LYPGIPVIF

SEQ ID NO: 150334 - protein, 9 aa, Homo Sapiens
LYPSIIQEF

SEQ ID NO: 150335 - protein, 9 aa, Homo Sapiens
LYQDTHQEY

SEQ ID NO: 150336 - protein, 9 aa, Homo Sapiens
LYRNCVYTY

SEQ ID NO: 150337 - protein, 9 aa, Homo Sapiens
LYRPGSVAY

SEQ ID NO: 150338 - protein, 9 aa, Homo Sapiens
LYSPQYISY

SEQ ID NO: 150339 - protein, 9 aa, Homo Sapiens
LYWSHPRKF

SEQ ID NO: 150340 - protein, 9 aa, Homo Sapiens
MAPLKMLAL

SEQ ID NO: 150341 - protein, 9 aa, Homo Sapiens
MKPLVVFVL

SEQ ID NO: 150342 - protein, 9 aa, Homo Sapiens
MRKEFTLEF

SEQ ID NO: 150343 - protein, 9 aa, Homo Sapiens
MRMATPLLM

SEQ ID NO: 150344 - protein, 9 aa, Homo Sapiens
MRNAVCIFY

SEQ ID NO: 150345 - protein, 9 aa, Homo Sapiens
MRPDLELQF

SEQ ID NO: 150346 - protein, 9 aa, Homo Sapiens
MRPLDIVEL

SEQ ID NO: 150347 - protein, 9 aa, Homo Sapiens
MRPNNLVHF

SEQ ID NO: 150348 - protein, 9 aa, Homo Sapiens
MRSLLRTPF

SEQ ID NO: 150349 - protein, 9 aa, Homo Sapiens
MYHGAAFQL

SEQ ID NO: 150350 - protein, 9 aa, Homo Sapiens
MYPAFAEEY

SEQ ID NO: 150351 - protein, 9 aa, Homo Sapiens
MYRDYPLEL

SEQ ID NO: 150352 - protein, 9 aa, Homo Sapiens
MYRSYVEML

SEQ ID NO: 150353 - protein, 9 aa, Homo Sapiens
NKAAVVLCM

SEQ ID NO: 150354 - protein, 9 aa, Homo Sapiens
NKADVILKY

SEQ ID NO: 150355 - protein, 9 aa, Homo Sapiens
NKKGEIFEL

SEQ ID NO: 150356 - protein, 9 aa, Homo Sapiens
NKNPNIVNY

SEQ ID NO: 150357 - protein, 9 aa, Homo Sapiens
NKTDVVLIL

SEQ ID NO: 150358 - protein, 9 aa, Homo Sapiens
NRAFVSMVY

SEQ ID NO: 150359 - protein, 9 aa, Homo Sapiens
NRFNYPFEL

SEQ ID NO: 150360 - protein, 9 aa, Homo Sapiens
NRFPWPKVL

SEQ ID NO: 150361 - protein, 9 aa, Homo Sapiens
NRGDFFMTL

SEQ ID NO: 150362 - protein, 9 aa, Homo Sapiens
NRGEVVTSF

SEQ ID NO: 150363 - protein, 9 aa, Homo Sapiens
NRGQFFTVY

SEQ ID NO: 150364 - protein, 9 aa, Homo Sapiens
NRHAVVMEL

SEQ ID NO: 150365 - protein, 9 aa, Homo Sapiens
NRHGLIRKY

SEQ ID NO: 150366 - protein, 9 aa, Homo Sapiens
NRIHYNIFY

SEQ ID NO: 150367 - protein, 9 aa, Homo Sapiens
NRKEFVNLY

SEQ ID NO: 150368 - protein, 9 aa, Homo Sapiens
NRLFHKTVY

SEQ ID NO: 150369 - protein, 9 aa, Homo Sapiens
NRLGYTHLY

SEQ ID NO: 150370 - protein, 9 aa, Homo Sapiens
NRLLEATSY

SEQ ID NO: 150371 - protein, 9 aa, Homo Sapiens
NRLLLPHAF

SEQ ID NO: 150372 - protein, 9 aa, Homo Sapiens
NRLPLVVSF

SEQ ID NO: 150373 - protein, 9 aa, Homo Sapiens
NRLSFFFDF

SEQ ID NO: 150374 - protein, 9 aa, Homo Sapiens
NRMTVEYVY

SEQ ID NO: 150375 - protein, 9 aa, Homo Sapiens
NRNLVSPAY

SEQ ID NO: 150376 - protein, 9 aa, Homo Sapiens
NRNSIPLQL

SEQ ID NO: 150377 - protein, 9 aa, Homo Sapiens
NRPADVYSY

SEQ ID NO: 150378 - protein, 9 aa, Homo Sapiens
NRPEFITEF

SEQ ID NO: 150379 - protein, 9 aa, Homo Sapiens
NRPGLSYHY

SEQ ID NO: 150380 - protein, 9 aa, Homo Sapiens
NRPGTVSSL

SEQ ID NO: 150381 - protein, 9 aa, Homo Sapiens
NRPKALNAL

SEQ ID NO: 150382 - protein, 9 aa, Homo Sapiens
NRPNDVYAY

SEQ ID NO: 150383 - protein, 9 aa, Homo Sapiens
NRPNLYYEV

SEQ ID NO: 150384 - protein, 9 aa, Homo Sapiens
NRPPFGQGY

SEQ ID NO: 150385 - protein, 9 aa, Homo Sapiens
NRPPSSTEL

SEQ ID NO: 150386 - protein, 9 aa, Homo Sapiens
NRPRNIMVY

SEQ ID NO: 150387 - protein, 9 aa, Homo Sapiens
NRPTNSIVF

SEQ ID NO: 150388 - protein, 9 aa, Homo Sapiens
NRPVEVYQY

SEQ ID NO: 150389 - protein, 9 aa, Homo Sapiens
NRPVHAYKF

SEQ ID NO: 150390 - protein, 9 aa, Homo Sapiens
NRRPSVYLP

SEQ ID NO: 150391 - protein, 9 aa, Homo Sapiens
NRSNFPVVL

SEQ ID NO: 150392 - protein, 9 aa, Homo Sapiens
NRTDTEYVL

SEQ ID NO: 150393 - protein, 9 aa, Homo Sapiens
NRTETVTSF

SEQ ID NO: 150394 - protein, 9 aa, Homo Sapiens
NRTIVITSH

SEQ ID NO: 150395 - protein, 9 aa, Homo Sapiens
NRVLHYWTM

SEQ ID NO: 150396 - protein, 9 aa, Homo Sapiens
NRYSHDFNF

SEQ ID NO: 150397 - protein, 9 aa, Homo Sapiens
NRYYSHVDY

SEQ ID NO: 150398 - protein, 9 aa, Homo Sapiens
NSPLPGSEL

SEQ ID NO: 150399 - protein, 9 aa, Homo Sapiens
NTPSGTNAL

SEQ ID NO: 150400 - protein, 9 aa, Homo Sapiens
NVPVRDIPA

SEQ ID NO: 150401 - protein, 9 aa, Homo Sapiens
NYFGAQPHY

SEQ ID NO: 150402 - protein, 9 aa, Homo Sapiens
NYFHLAVAF

SEQ ID NO: 150403 - protein, 9 aa, Homo Sapiens
NYFLRLCSF

SEQ ID NO: 150404 - protein, 9 aa, Homo Sapiens
NYGVLLHEL

SEQ ID NO: 150405 - protein, 9 aa, Homo Sapiens
NYHAQHYHL

SEQ ID NO: 150406 - protein, 9 aa, Homo Sapiens
NYIEFTRIL

SEQ ID NO: 150407 - protein, 9 aa, Homo Sapiens
NYLPFIMEL

SEQ ID NO: 150408 - protein, 9 aa, Homo Sapiens
NYNEKIYEL

SEQ ID NO: 150409 - protein, 9 aa, Homo Sapiens
NYPAFMMEM

SEQ ID NO: 150410 - protein, 9 aa, Homo Sapiens
NYPGFLTIL

SEQ ID NO: 150411 - protein, 9 aa, Homo Sapiens
NYPGLSISL

SEQ ID NO: 150412 - protein, 9 aa, Homo Sapiens
NYRHVANTL

SEQ ID NO: 150413 - protein, 9 aa, Homo Sapiens
NYRPDHCIY

SEQ ID NO: 150414 - protein, 9 aa, Homo Sapiens
NYSQQLQVY

SEQ ID NO: 150415 - protein, 9 aa, Homo Sapiens
NYYGKYIAL

SEQ ID NO: 150416 - protein, 9 aa, Homo Sapiens
PIRLLAAAA

SEQ ID NO: 150417 - protein, 9 aa, Homo Sapiens
PSIVHRKCF

SEQ ID NO: 150418 - protein, 9 aa, Homo Sapiens
QIPEIKQTL

SEQ ID NO: 150419 - protein, 9 aa, Homo Sapiens
QRAPGGLSY

SEQ ID NO: 150420 - protein, 9 aa, Homo Sapiens
QRNEVVVEL

SEQ ID NO: 150421 - protein, 9 aa, Homo Sapiens
QRPETAATL

SEQ ID NO: 150422 - protein, 9 aa, Homo Sapiens
QRPFFPILY

SEQ ID NO: 150423 - protein, 9 aa, Homo Sapiens
QRPPTRETF

SEQ ID NO: 150424 - protein, 9 aa, Homo Sapiens
QRPRESYQM

SEQ ID NO: 150425 - protein, 9 aa, Homo Sapiens
QRPTIYYVM

SEQ ID NO: 150426 - protein, 9 aa, Homo Sapiens
QRQDIAFAY

SEQ ID NO: 150427 - protein, 9 aa, Homo Sapiens
QRQEVCQSY

SEQ ID NO: 150428 - protein, 9 aa, Homo Sapiens
QRRPAGISY

SEQ ID NO: 150429 - protein, 9 aa, Homo Sapiens
QRVDYIMQL

SEQ ID NO: 150430 - protein, 9 aa, Homo Sapiens
QRVSCAHIY

SEQ ID NO: 150431 - protein, 9 aa, Homo Sapiens
QYFARMCSL

SEQ ID NO: 150432 - protein, 9 aa, Homo Sapiens
QYNPLPIEY

SEQ ID NO: 150433 - protein, 9 aa, Homo Sapiens
QYNTYPIKL

SEQ ID NO: 150434 - protein, 9 aa, Homo Sapiens
QYPGRSLVF

SEQ ID NO: 150435 - protein, 9 aa, Homo Sapiens
RAGLPAPTI

SEQ ID NO: 150436 - protein, 9 aa, Homo Sapiens
RKNPFVYKV

SEQ ID NO: 150437 - protein, 9 aa, Homo Sapiens
RRAEVELEY

SEQ ID NO: 150438 - protein, 9 aa, Homo Sapiens
RRDYVFIEF

SEQ ID NO: 150439 - protein, 9 aa, Homo Sapiens
RRFDTAFFL

SEQ ID NO: 150440 - protein, 9 aa, Homo Sapiens
RRFFPYYVY

SEQ ID NO: 150441 - protein, 9 aa, Homo Sapiens
RRFMQTFVL

SEQ ID NO: 150442 - protein, 9 aa, Homo Sapiens
RRFTEIYEF

SEQ ID NO: 150443 - protein, 9 aa, Homo Sapiens
RRGDFIHVM

SEQ ID NO: 150444 - protein, 9 aa, Homo Sapiens
RRGEYVLTF

SEQ ID NO: 150445 - protein, 9 aa, Homo Sapiens
RRIDFVLVY

SEQ ID NO: 150446 - protein, 9 aa, Homo Sapiens
RRIEIAHSL

SEQ ID NO: 150447 - protein, 9 aa, Homo Sapiens
RRKDGVFLY

SEQ ID NO: 150448 - protein, 9 aa, Homo Sapiens
RRMENLVAY

SEQ ID NO: 150449 - protein, 9 aa, Homo Sapiens
RRMEVYNEF

SEQ ID NO: 150450 - protein, 9 aa, Homo Sapiens
RRNDKIIVF

SEQ ID NO: 150451 - protein, 9 aa, Homo Sapiens
RRNPEPLRF

SEQ ID NO: 150452 - protein, 9 aa, Homo Sapiens
RRNPGVVIY

SEQ ID NO: 150453 - protein, 9 aa, Homo Sapiens
RRNPYCRTL

SEQ ID NO: 150454 - protein, 9 aa, Homo Sapiens
RRPPILEDY

SEQ ID NO: 150455 - protein, 9 aa, Homo Sapiens
RRQEAIYEM

SEQ ID NO: 150456 - protein, 9 aa, Homo Sapiens
RRQNVAYEY

SEQ ID NO: 150457 - protein, 9 aa, Homo Sapiens
RRTDCAYVV

SEQ ID NO: 150458 - protein, 9 aa, Homo Sapiens
RRWEQALTF

SEQ ID NO: 150459 - protein, 9 aa, Homo Sapiens
RYHPQALIY

SEQ ID NO: 150460 - protein, 9 aa, Homo Sapiens
RYKDLRTAY

SEQ ID NO: 150461 - protein, 9 aa, Homo Sapiens
RYLTVAAVF

SEQ ID NO: 150462 - protein, 9 aa, Homo Sapiens
RYNDITKVY

SEQ ID NO: 150463 - protein, 9 aa, Homo Sapiens
RYNGLSFVY

SEQ ID NO: 150464 - protein, 9 aa, Homo Sapiens
RYPAEIRKY

SEQ ID NO: 150465 - protein, 9 aa, Homo Sapiens
RYPDLELKY

SEQ ID NO: 150466 - protein, 9 aa, Homo Sapiens
RYPNIELSY

SEQ ID NO: 150467 - protein, 9 aa, Homo Sapiens
RYREAIIKY

SEQ ID NO: 150468 - protein, 9 aa, Homo Sapiens
RYRPGTVAL

SEQ ID NO: 150469 - protein, 9 aa, Homo Sapiens
RYSEAVFYY

SEQ ID NO: 150470 - protein, 9 aa, Homo Sapiens
SAPDKSLEL

SEQ ID NO: 150471 - protein, 9 aa, Homo Sapiens
SAPGIISAL

SEQ ID NO: 150472 - protein, 9 aa, Homo Sapiens
SAPSSSTPF

SEQ ID NO: 150473 - protein, 9 aa, Homo Sapiens
SAPVPASPL

SEQ ID NO: 150474 - protein, 9 aa, Homo Sapiens
SFYFFFSSF

SEQ ID NO: 150475 - protein, 9 aa, Homo Sapiens
SGPGPAAAL

SEQ ID NO: 150476 - protein, 9 aa, Homo Sapiens
SGPVPGTAI

SEQ ID NO: 150477 - protein, 9 aa, Homo Sapiens
SIPTKALEL

SEQ ID NO: 150478 - protein, 9 aa, Homo Sapiens
SKADALFEL

SEQ ID NO: 150479 - protein, 9 aa, Homo Sapiens
SKIDYFLEY

SEQ ID NO: 150480 - protein, 9 aa, Homo Sapiens
SKNPHIVSF

SEQ ID NO: 150481 - protein, 9 aa, Homo Sapiens
SKSPFIVHL

SEQ ID NO: 150482 - protein, 9 aa, Homo Sapiens
SNPGGRPAL

SEQ ID NO: 150483 - protein, 9 aa, Homo Sapiens
SRADTILCL

SEQ ID NO: 150484 - protein, 9 aa, Homo Sapiens
SRAIFEEVY

SEQ ID NO: 150485 - protein, 9 aa, Homo Sapiens
SRAMLLTSY

SEQ ID NO: 150486 - protein, 9 aa, Homo Sapiens
SRAPSTYTY

SEQ ID NO: 150487 - protein, 9 aa, Homo Sapiens
SRFAKVHIL

SEQ ID NO: 150488 - protein, 9 aa, Homo Sapiens
SRFEKEFSF

SEQ ID NO: 150489 - protein, 9 aa, Homo Sapiens
SRFGNAFHL

SEQ ID NO: 150490 - protein, 9 aa, Homo Sapiens
SRFIFNYVY

SEQ ID NO: 150491 - protein, 9 aa, Homo Sapiens
SRFIKFQEM

SEQ ID NO: 150492 - protein, 9 aa, Homo Sapiens
SRFLNKQPY

SEQ ID NO: 150493 - protein, 9 aa, Homo Sapiens
SRFNRYYSL

SEQ ID NO: 150494 - protein, 9 aa, Homo Sapiens
SRFPEALRL

SEQ ID NO: 150495 - protein, 9 aa, Homo Sapiens
SRFSNVYHL

SEQ ID NO: 150496 - protein, 9 aa, Homo Sapiens
SRFTYPYLL

SEQ ID NO: 150497 - protein, 9 aa, Homo Sapiens
SRGDFVVEY

SEQ ID NO: 150498 - protein, 9 aa, Homo Sapiens
SRGDVKVIM

SEQ ID NO: 150499 - protein, 9 aa, Homo Sapiens
SRGEQAWTL

SEQ ID NO: 150500 - protein, 9 aa, Homo Sapiens
SRHLDSYEF

SEQ ID NO: 150501 - protein, 9 aa, Homo Sapiens
SRHSIPSEM

SEQ ID NO: 150502 - protein, 9 aa, Homo Sapiens
SRIHPVSTM

SEQ ID NO: 150503 - protein, 9 aa, Homo Sapiens
SRIQYEMEY

SEQ ID NO: 150504 - protein, 9 aa, Homo Sapiens
SRKELPEYY

SEQ ID NO: 150505 - protein, 9 aa, Homo Sapiens
SRKGPAPEL

SEQ ID NO: 150506 - protein, 9 aa, Homo Sapiens
SRKSFVFEL

SEQ ID NO: 150507 - protein, 9 aa, Homo Sapiens
SRLFQPVQY

SEQ ID NO: 150508 - protein, 9 aa, Homo Sapiens
SRNAITSSY

SEQ ID NO: 150509 - protein, 9 aa, Homo Sapiens
SRNAYMLVY

SEQ ID NO: 150510 - protein, 9 aa, Homo Sapiens
SRNEGVATY

SEQ ID NO: 150511 - protein, 9 aa, Homo Sapiens
SRNEIIQSY

SEQ ID NO: 150512 - protein, 9 aa, Homo Sapiens
SRNKDTYFL

SEQ ID NO: 150513 - protein, 9 aa, Homo Sapiens
SRPALPFIL

SEQ ID NO: 150514 - protein, 9 aa, Homo Sapiens
SRPDGSASF

SEQ ID NO: 150515 - protein, 9 aa, Homo Sapiens
SRPDTECKF

SEQ ID NO: 150516 - protein, 9 aa, Homo Sapiens
SRPEANEAL

SEQ ID NO: 150517 - protein, 9 aa, Homo Sapiens
SRPEAPNEF

SEQ ID NO: 150518 - protein, 9 aa, Homo Sapiens
SRPENAIIY

SEQ ID NO: 150519 - protein, 9 aa, Homo Sapiens
SRPESFAIY

SEQ ID NO: 150520 - protein, 9 aa, Homo Sapiens
SRPGVCLVV

SEQ ID NO: 150521 - protein, 9 aa, Homo Sapiens
SRPHFLIEL

SEQ ID NO: 150522 - protein, 9 aa, Homo Sapiens
SRPKLSFSL

SEQ ID NO: 150523 - protein, 9 aa, Homo Sapiens
SRPLHISTF

SEQ ID NO: 150524 - protein, 9 aa, Homo Sapiens
SRPLSAVVL

SEQ ID NO: 150525 - protein, 9 aa, Homo Sapiens
SRPNIILVM

SEQ ID NO: 150526 - protein, 9 aa, Homo Sapiens
SRPPAQTSL

SEQ ID NO: 150527 - protein, 9 aa, Homo Sapiens
SRPPCQPQF

SEQ ID NO: 150528 - protein, 9 aa, Homo Sapiens
SRPPGQGEF

SEQ ID NO: 150529 - protein, 9 aa, Homo Sapiens
SRPPVTLRL

SEQ ID NO: 150530 - protein, 9 aa, Homo Sapiens
SRPSTYYEL

SEQ ID NO: 150531 - protein, 9 aa, Homo Sapiens
SRPYAFLEF

SEQ ID NO: 150532 - protein, 9 aa, Homo Sapiens
SRQVGERTL

SEQ ID NO: 150533 - protein, 9 aa, Homo Sapiens
SRSHSVFQL

SEQ ID NO: 150534 - protein, 9 aa, Homo Sapiens
SRSHYSPIY

SEQ ID NO: 150535 - protein, 9 aa, Homo Sapiens
SRSLLESTY

SEQ ID NO: 150536 - protein, 9 aa, Homo Sapiens
SRSLLQTTF

SEQ ID NO: 150537 - protein, 9 aa, Homo Sapiens
SRSPVYSHF

SEQ ID NO: 150538 - protein, 9 aa, Homo Sapiens
SRSVMTEEY

SEQ ID NO: 150539 - protein, 9 aa, Homo Sapiens
SRSWLSYSY

SEQ ID NO: 150540 - protein, 9 aa, Homo Sapiens
SRTPYHVNL

SEQ ID NO: 150541 - protein, 9 aa, Homo Sapiens
SRVEAVYVL

SEQ ID NO: 150542 - protein, 9 aa, Homo Sapiens
SRVETPVSY

SEQ ID NO: 150543 - protein, 9 aa, Homo Sapiens
SRVHAALVY

SEQ ID NO: 150544 - protein, 9 aa, Homo Sapiens
SRVLQNVAF

SEQ ID NO: 150545 - protein, 9 aa, Homo Sapiens
SRVNVAICL

SEQ ID NO: 150546 - protein, 9 aa, Homo Sapiens
SRVVTVSEY

SEQ ID NO: 150547 - protein, 9 aa, Homo Sapiens
SRYDPSISF

SEQ ID NO: 150548 - protein, 9 aa, Homo Sapiens
SRYEVPCVL

SEQ ID NO: 150549 - protein, 9 aa, Homo Sapiens
SRYVLDDEY

SEQ ID NO: 150550 - protein, 9 aa, Homo Sapiens
SSPAPRTAL

SEQ ID NO: 150551 - protein, 9 aa, Homo Sapiens
SSPQAGSSL

SEQ ID NO: 150552 - protein, 9 aa, Homo Sapiens
SVPAFASSL

SEQ ID NO: 150553 - protein, 9 aa, Homo Sapiens
SYFGSFSSL

SEQ ID NO: 150554 - protein, 9 aa, Homo Sapiens
SYHSYVIGF

SEQ ID NO: 150555 - protein, 9 aa, Homo Sapiens
SYIGLGHIY

SEQ ID NO: 150556 - protein, 9 aa, Homo Sapiens
SYKDSTLIM

SEQ ID NO: 150557 - protein, 9 aa, Homo Sapiens
SYKGHVDIL

SEQ ID NO: 150558 - protein, 9 aa, Homo Sapiens
SYLENPTSY

SEQ ID NO: 150559 - protein, 9 aa, Homo Sapiens
SYLEYQKVM

SEQ ID NO: 150560 - protein, 9 aa, Homo Sapiens
SYNDYVREF

SEQ ID NO: 150561 - protein, 9 aa, Homo Sapiens
SYNPVTHIY

SEQ ID NO: 150562 - protein, 9 aa, Homo Sapiens
SYPDFLHKM

SEQ ID NO: 150563 - protein, 9 aa, Homo Sapiens
SYPDFLRMM

SEQ ID NO: 150564 - protein, 9 aa, Homo Sapiens
SYPDIHFDM

SEQ ID NO: 150565 - protein, 9 aa, Homo Sapiens
SYPGGQLVF

SEQ ID NO: 150566 - protein, 9 aa, Homo Sapiens
SYPGSSYIF

SEQ ID NO: 150567 - protein, 9 aa, Homo Sapiens
SYPNVFLVF

SEQ ID NO: 150568 - protein, 9 aa, Homo Sapiens
SYPTTTISY

SEQ ID NO: 150569 - protein, 9 aa, Homo Sapiens
SYPYFVIQY

SEQ ID NO: 150570 - protein, 9 aa, Homo Sapiens
SYQDAAFTY

SEQ ID NO: 150571 - protein, 9 aa, Homo Sapiens
SYRDAISMY

SEQ ID NO: 150572 - protein, 9 aa, Homo Sapiens
SYRDSYDSY

SEQ ID NO: 150573 - protein, 9 aa, Homo Sapiens
SYRDSYESY

SEQ ID NO: 150574 - protein, 9 aa, Homo Sapiens
SYREAVFKM

SEQ ID NO: 150575 - protein, 9 aa, Homo Sapiens
TAPQGNVDL

SEQ ID NO: 150576 - protein, 9 aa, Homo Sapiens
TFRDVAIEF

SEQ ID NO: 150577 - protein, 9 aa, Homo Sapiens
TFRDVVIEF

SEQ ID NO: 150578 - protein, 9 aa, Homo Sapiens
TKIDVSYEY

SEQ ID NO: 150579 - protein, 9 aa, Homo Sapiens
TKQNSVLLL

SEQ ID NO: 150580 - protein, 9 aa, Homo Sapiens
TRAQWFYEY

SEQ ID NO: 150581 - protein, 9 aa, Homo Sapiens
TRIGYHISL

SEQ ID NO: 150582 - protein, 9 aa, Homo Sapiens
TRLYPVFFL

SEQ ID NO: 150583 - protein, 9 aa, Homo Sapiens
TRMRHVISY

SEQ ID NO: 150584 - protein, 9 aa, Homo Sapiens
TRNDYVMMY

SEQ ID NO: 150585 - protein, 9 aa, Homo Sapiens
TRNNFAVGY

SEQ ID NO: 150586 - protein, 9 aa, Homo Sapiens
TRNPLVAVY

SEQ ID NO: 150587 - protein, 9 aa, Homo Sapiens
TRNPVSEEL

SEQ ID NO: 150588 - protein, 9 aa, Homo Sapiens
TRPAAQPSF

SEQ ID NO: 150589 - protein, 9 aa, Homo Sapiens
TRPDMIRIL

SEQ ID NO: 150590 - protein, 9 aa, Homo Sapiens
TRPEKALIL

SEQ ID NO: 150591 - protein, 9 aa, Homo Sapiens
TRPPALLLL

SEQ ID NO: 150592 - protein, 9 aa, Homo Sapiens
TRPPEPRHI

SEQ ID NO: 150593 - protein, 9 aa, Homo Sapiens
TRPQQLVCF

SEQ ID NO: 150594 - protein, 9 aa, Homo Sapiens
TRSAIILHL

SEQ ID NO: 150595 - protein, 9 aa, Homo Sapiens
TRSFYKHIL

SEQ ID NO: 150596 - protein, 9 aa, Homo Sapiens
TRSPHIETY

SEQ ID NO: 150597 - protein, 9 aa, Homo Sapiens
TRTIYQFHY

SEQ ID NO: 150598 - protein, 9 aa, Homo Sapiens
TRTPVAKEL

SEQ ID NO: 150599 - protein, 9 aa, Homo Sapiens
TRVDTILEF

SEQ ID NO: 150600 - protein, 9 aa, Homo Sapiens
TRVKAVRIL

SEQ ID NO: 150601 - protein, 9 aa, Homo Sapiens
TRYDLYHTF

SEQ ID NO: 150602 - protein, 9 aa, Homo Sapiens
TRYQGVNLY

SEQ ID NO: 150603 - protein, 9 aa, Homo Sapiens
TSPEAFLAL

SEQ ID NO: 150604 - protein, 9 aa, Homo Sapiens
TVMDKTRAL

SEQ ID NO: 150605 - protein, 9 aa, Homo Sapiens
TYGDAGLTY

SEQ ID NO: 150606 - protein, 9 aa, Homo Sapiens
TYGERVVAF

SEQ ID NO: 150607 - protein, 9 aa, Homo Sapiens
TYKDPITEF

SEQ ID NO: 150608 - protein, 9 aa, Homo Sapiens
TYKDYVDLF

SEQ ID NO: 150609 - protein, 9 aa, Homo Sapiens
TYPEVVRMV

SEQ ID NO: 150610 - protein, 9 aa, Homo Sapiens
TYQVLAVTF

SEQ ID NO: 150611 - protein, 9 aa, Homo Sapiens
TYRAIAETY

SEQ ID NO: 150612 - protein, 9 aa, Homo Sapiens
TYRLFAVVY

SEQ ID NO: 150613 - protein, 9 aa, Homo Sapiens
TYSEFAREL

SEQ ID NO: 150614 - protein, 9 aa, Homo Sapiens
TYYGSFVTR

SEQ ID NO: 150615 - protein, 9 aa, Homo Sapiens
VAPGKRPAL

SEQ ID NO: 150616 - protein, 9 aa, Homo Sapiens
VAPPGCSHL

SEQ ID NO: 150617 - protein, 9 aa, Homo Sapiens
VAPPVSGDL

SEQ ID NO: 150618 - protein, 9 aa, Homo Sapiens
VAPTSGPAL

SEQ ID NO: 150619 - protein, 9 aa, Homo Sapiens
VAPVAQVAL

SEQ ID NO: 150620 - protein, 9 aa, Homo Sapiens
VFRDLVIKY

SEQ ID NO: 150621 - protein, 9 aa, Homo Sapiens
VHADVYRVL

SEQ ID NO: 150622 - protein, 9 aa, Homo Sapiens
VHAFPELFL

SEQ ID NO: 150623 - protein, 9 aa, Homo Sapiens
VHPPPTTTY

SEQ ID NO: 150624 - protein, 9 aa, Homo Sapiens
VHVDVHSHY

SEQ ID NO: 150625 - protein, 9 aa, Homo Sapiens
VKSDVEINY

SEQ ID NO: 150626 - protein, 9 aa, Homo Sapiens
VKSDYVVKY

SEQ ID NO: 150627 - protein, 9 aa, Homo Sapiens
VKTDTVLIL

SEQ ID NO: 150628 - protein, 9 aa, Homo Sapiens
VRADCHYRY

SEQ ID NO: 150629 - protein, 9 aa, Homo Sapiens
VRAEVQHQL

SEQ ID NO: 150630 - protein, 9 aa, Homo Sapiens
VRANLPQSF

SEQ ID NO: 150631 - protein, 9 aa, Homo Sapiens
VRANVPEEL

SEQ ID NO: 150632 - protein, 9 aa, Homo Sapiens
VRAWVVFKL

SEQ ID NO: 150633 - protein, 9 aa, Homo Sapiens
VRDHWVHVL

SEQ ID NO: 150634 - protein, 9 aa, Homo Sapiens
VRENVPRVL

SEQ ID NO: 150635 - protein, 9 aa, Homo Sapiens
VRFDQVTVY

SEQ ID NO: 150636 - protein, 9 aa, Homo Sapiens
VRKKFVTEL

SEQ ID NO: 150637 - protein, 9 aa, Homo Sapiens
VRKSIARVL

SEQ ID NO: 150638 - protein, 9 aa, Homo Sapiens
VRNAVTQEF

SEQ ID NO: 150639 - protein, 9 aa, Homo Sapiens
VRNDIYITL

SEQ ID NO: 150640 - protein, 9 aa, Homo Sapiens
VRNEHFWTL

SEQ ID NO: 150641 - protein, 9 aa, Homo Sapiens
VRNNVIIVM

SEQ ID NO: 150642 - protein, 9 aa, Homo Sapiens
VRNPEAEEM

SEQ ID NO: 150643 - protein, 9 aa, Homo Sapiens
VRNYEQWQL

SEQ ID NO: 150644 - protein, 9 aa, Homo Sapiens
VRPAEPAFL

SEQ ID NO: 150645 - protein, 9 aa, Homo Sapiens
VRPDDAIEL

SEQ ID NO: 150646 - protein, 9 aa, Homo Sapiens
VRPDNTYEV

SEQ ID NO: 150647 - protein, 9 aa, Homo Sapiens
VRPDTVRNL

SEQ ID NO: 150648 - protein, 9 aa, Homo Sapiens
VRPHIDISF

SEQ ID NO: 150649 - protein, 9 aa, Homo Sapiens
VRPLATLSY

SEQ ID NO: 150650 - protein, 9 aa, Homo Sapiens
VRPLLSASY

SEQ ID NO: 150651 - protein, 9 aa, Homo Sapiens
VRPLRLFVY

SEQ ID NO: 150652 - protein, 9 aa, Homo Sapiens
VRPPPGPEL

SEQ ID NO: 150653 - protein, 9 aa, Homo Sapiens
VRPPQIKSL

SEQ ID NO: 150654 - protein, 9 aa, Homo Sapiens
VRPPQQVVY

SEQ ID NO: 150655 - protein, 9 aa, Homo Sapiens
VRPPTPREL

SEQ ID NO: 150656 - protein, 9 aa, Homo Sapiens
VRPSYWLVL

SEQ ID NO: 150657 - protein, 9 aa, Homo Sapiens
VRPTYCLEY

SEQ ID NO: 150658 - protein, 9 aa, Homo Sapiens
VRPYCFIEF

SEQ ID NO: 150659 - protein, 9 aa, Homo Sapiens
VRQDVINTL

SEQ ID NO: 150660 - protein, 9 aa, Homo Sapiens
VRSGYYKVL

SEQ ID NO: 150661 - protein, 9 aa, Homo Sapiens
VRSPHPYQL

SEQ ID NO: 150662 - protein, 9 aa, Homo Sapiens
VRSPVVHSV

SEQ ID NO: 150663 - protein, 9 aa, Homo Sapiens
VRTPYTMSY

SEQ ID NO: 150664 - protein, 9 aa, Homo Sapiens
VRVDRDYVL

SEQ ID NO: 150665 - protein, 9 aa, Homo Sapiens
VRVEPLVTM

SEQ ID NO: 150666 - protein, 9 aa, Homo Sapiens
VRVPVTSNL

SEQ ID NO: 150667 - protein, 9 aa, Homo Sapiens
VRVPYFIDL

SEQ ID NO: 150668 - protein, 9 aa, Homo Sapiens
VSPDAKTSL

SEQ ID NO: 150669 - protein, 9 aa, Homo Sapiens
VSPLATSAL

SEQ ID NO: 150670 - protein, 9 aa, Homo Sapiens
VYCPVQWEY

SEQ ID NO: 150671 - protein, 9 aa, Homo Sapiens
VYFGHWVVM

SEQ ID NO: 150672 - protein, 9 aa, Homo Sapiens
VYGPLPQSF

SEQ ID NO: 150673 - protein, 9 aa, Homo Sapiens
VYGTRLVVL

SEQ ID NO: 150674 - protein, 9 aa, Homo Sapiens
VYGVVPISL

SEQ ID NO: 150675 - protein, 9 aa, Homo Sapiens
VYHEILIGY

SEQ ID NO: 150676 - protein, 9 aa, Homo Sapiens
VYKAFVDNY

SEQ ID NO: 150677 - protein, 9 aa, Homo Sapiens
VYKDLVLLL

SEQ ID NO: 150678 - protein, 9 aa, Homo Sapiens
VYKKSIFVF

SEQ ID NO: 150679 - protein, 9 aa, Homo Sapiens
VYNENLVHM

SEQ ID NO: 150680 - protein, 9 aa, Homo Sapiens
VYNIYIRRY

SEQ ID NO: 150681 - protein, 9 aa, Homo Sapiens
VYPERSTSY

SEQ ID NO: 150682 - protein, 9 aa, Homo Sapiens
VYPEYVIQY

SEQ ID NO: 150683 - protein, 9 aa, Homo Sapiens
VYPGIAVFF

SEQ ID NO: 150684 - protein, 9 aa, Homo Sapiens
VYPGYYLTF

SEQ ID NO: 150685 - protein, 9 aa, Homo Sapiens
VYPLYTIVF

SEQ ID NO: 150686 - protein, 9 aa, Homo Sapiens
VYPPIRHHL

SEQ ID NO: 150687 - protein, 9 aa, Homo Sapiens
VYPPLKGSF

SEQ ID NO: 150688 - protein, 9 aa, Homo Sapiens
VYPPPHQVF

SEQ ID NO: 150689 - protein, 9 aa, Homo Sapiens
VYPQPPFSY

SEQ ID NO: 150690 - protein, 9 aa, Homo Sapiens
VYPQYVIEY

SEQ ID NO: 150691 - protein, 9 aa, Homo Sapiens
VYPTAVHVL

SEQ ID NO: 150692 - protein, 9 aa, Homo Sapiens
VYPWTQRFF

SEQ ID NO: 150693 - protein, 9 aa, Homo Sapiens
VYQEMPAQL

SEQ ID NO: 150694 - protein, 9 aa, Homo Sapiens
VYRTPTEAL

SEQ ID NO: 150695 - protein, 9 aa, Homo Sapiens
VYRTVIEYY

SEQ ID NO: 150696 - protein, 9 aa, Homo Sapiens
VYVQHPITF

SEQ ID NO: 150697 - protein, 9 aa, Homo Sapiens
WRPPPLNPY

SEQ ID NO: 150698 - protein, 9 aa, Homo Sapiens
YAGLSMEGG

SEQ ID NO: 150699 - protein, 9 aa, Homo Sapiens
YHIGIPLTY

SEQ ID NO: 150700 - protein, 9 aa, Homo Sapiens
YHSPYPEEY

SEQ ID NO: 150701 - protein, 9 aa, Homo Sapiens
YKAPTDYCF

SEQ ID NO: 150702 - protein, 9 aa, Homo Sapiens
YKFDFPVSY

SEQ ID NO: 150703 - protein, 9 aa, Homo Sapiens
YKGQYILTL

SEQ ID NO: 150704 - protein, 9 aa, Homo Sapiens
YKIAFPYLY

SEQ ID NO: 150705 - protein, 9 aa, Homo Sapiens
YKIPYTTVL

SEQ ID NO: 150706 - protein, 9 aa, Homo Sapiens
YKLDNQFEL

SEQ ID NO: 150707 - protein, 9 aa, Homo Sapiens
YKNPDQVYL

SEQ ID NO: 150708 - protein, 9 aa, Homo Sapiens
YKNPSEYHY

SEQ ID NO: 150709 - protein, 9 aa, Homo Sapiens
YKPDVKIEY

SEQ ID NO: 150710 - protein, 9 aa, Homo Sapiens
YKQPMFYHL

SEQ ID NO: 150711 - protein, 9 aa, Homo Sapiens
YKQVLEPSF

SEQ ID NO: 150712 - protein, 9 aa, Homo Sapiens
YKVEYPIMY

SEQ ID NO: 150713 - protein, 9 aa, Homo Sapiens
YKVPHPLEH

SEQ ID NO: 150714 - protein, 9 aa, Homo Sapiens
YKVPQVRVL

SEQ ID NO: 150715 - protein, 9 aa, Homo Sapiens
YLPYRDYNY

SEQ ID NO: 150716 - protein, 9 aa, Homo Sapiens
YRAQPSASL

SEQ ID NO: 150717 - protein, 9 aa, Homo Sapiens
YRDPHVDQY

SEQ ID NO: 150718 - protein, 9 aa, Homo Sapiens
YREILVKEL

SEQ ID NO: 150719 - protein, 9 aa, Homo Sapiens
YRFDPRSGP

SEQ ID NO: 150720 - protein, 9 aa, Homo Sapiens
YRFETVQKL

SEQ ID NO: 150721 - protein, 9 aa, Homo Sapiens
YRGQPGNAY

SEQ ID NO: 150722 - protein, 9 aa, Homo Sapiens
YRHDAVKIL

SEQ ID NO: 150723 - protein, 9 aa, Homo Sapiens
YRHGKAYRF

SEQ ID NO: 150724 - protein, 9 aa, Homo Sapiens
YRHLCAVYY

SEQ ID NO: 150725 - protein, 9 aa, Homo Sapiens
YRHLVGVCY

SEQ ID NO: 150726 - protein, 9 aa, Homo Sapiens
YRHPDPREL

SEQ ID NO: 150727 - protein, 9 aa, Homo Sapiens
YRIESYWTY

SEQ ID NO: 150728 - protein, 9 aa, Homo Sapiens
YRKPKWNHL

SEQ ID NO: 150729 - protein, 9 aa, Homo Sapiens
YRKPTYESY

SEQ ID NO: 150730 - protein, 9 aa, Homo Sapiens
YRKTLIHCY

SEQ ID NO: 150731 - protein, 9 aa, Homo Sapiens
YRLEYMRVL

SEQ ID NO: 150732 - protein, 9 aa, Homo Sapiens
YRLHHVVVY

SEQ ID NO: 150733 - protein, 9 aa, Homo Sapiens
YRNAYTMVL

SEQ ID NO: 150734 - protein, 9 aa, Homo Sapiens
YRNEFTAWY

SEQ ID NO: 150735 - protein, 9 aa, Homo Sapiens
YRNKFTQKY

SEQ ID NO: 150736 - protein, 9 aa, Homo Sapiens
YRNPCYVSY

SEQ ID NO: 150737 - protein, 9 aa, Homo Sapiens
YRNPKEWTK

SEQ ID NO: 150738 - protein, 9 aa, Homo Sapiens
YRNPVSQCM

SEQ ID NO: 150739 - protein, 9 aa, Homo Sapiens
YRNVHAVVF

SEQ ID NO: 150740 - protein, 9 aa, Homo Sapiens
YRPAYLVTL

SEQ ID NO: 150741 - protein, 9 aa, Homo Sapiens
YRPDMPCFL

SEQ ID NO: 150742 - protein, 9 aa, Homo Sapiens
YRPGHYDIL

SEQ ID NO: 150743 - protein, 9 aa, Homo Sapiens
YRPGPWMKY

SEQ ID NO: 150744 - protein, 9 aa, Homo Sapiens
YRPHTITLL

SEQ ID NO: 150745 - protein, 9 aa, Homo Sapiens
YRPISASVL

SEQ ID NO: 150746 - protein, 9 aa, Homo Sapiens
YRPLQSTEF

SEQ ID NO: 150747 - protein, 9 aa, Homo Sapiens
YRPLTVLTF

SEQ ID NO: 150748 - protein, 9 aa, Homo Sapiens
YRPLYPFSL

SEQ ID NO: 150749 - protein, 9 aa, Homo Sapiens
YRPNETFHL

SEQ ID NO: 150750 - protein, 9 aa, Homo Sapiens
YRPPGARLT

SEQ ID NO: 150751 - protein, 9 aa, Homo Sapiens
YRPVLPLML

SEQ ID NO: 150752 - protein, 9 aa, Homo Sapiens
YRPVRQYVY

SEQ ID NO: 150753 - protein, 9 aa, Homo Sapiens
YRQKQVVIL

SEQ ID NO: 150754 - protein, 9 aa, Homo Sapiens
YRQPPVPQY

SEQ ID NO: 150755 - protein, 9 aa, Homo Sapiens
YRREIFIAF

SEQ ID NO: 150756 - protein, 9 aa, Homo Sapiens
YRRPVLLLH

SEQ ID NO: 150757 - protein, 9 aa, Homo Sapiens
YRTDLCLLY

SEQ ID NO: 150758 - protein, 9 aa, Homo Sapiens
YRTDMIQAL

SEQ ID NO: 150759 - protein, 9 aa, Homo Sapiens
YRTPTTHTM

SEQ ID NO: 150760 - protein, 9 aa, Homo Sapiens
YRTQSSASL

SEQ ID NO: 150761 - protein, 9 aa, Homo Sapiens
YRTTTVIFY

SEQ ID NO: 150762 - protein, 9 aa, Homo Sapiens
YRVGYCNQL

SEQ ID NO: 150763 - protein, 9 aa, Homo Sapiens
YRVHSIFVL

SEQ ID NO: 150764 - protein, 9 aa, Homo Sapiens
YRVNGQYIM

SEQ ID NO: 150765 - protein, 9 aa, Homo Sapiens
YRVPGQFML

SEQ ID NO: 150766 - protein, 9 aa, Homo Sapiens
YRVPNMRFL

SEQ ID NO: 150767 - protein, 9 aa, Homo Sapiens
YRVVFPLEL

SEQ ID NO: 150768 - protein, 9 aa, Homo Sapiens
YRVYQPVRY

SEQ ID NO: 150769 - protein, 9 aa, Homo Sapiens
YYFFTPYVY

SEQ ID NO: 150770 - protein, 9 aa, Homo Sapiens
YYFSKLIEF

SEQ ID NO: 150771 - protein, 9 aa, Homo Sapiens
YYFVFDHAL

SEQ ID NO: 150772 - protein, 9 aa, Homo Sapiens
YYGEHLFML

SEQ ID NO: 150773 - protein, 9 aa, Homo Sapiens
YYGNRAATL

SEQ ID NO: 150774 - protein, 9 aa, Homo Sapiens
YYHARVYEF

SEQ ID NO: 150775 - protein, 9 aa, Homo Sapiens
YYHVYKLTL

SEQ ID NO: 150776 - protein, 9 aa, Homo Sapiens
YYIDCIRQV

SEQ ID NO: 150777 - protein, 9 aa, Homo Sapiens
YYISPRITF

SEQ ID NO: 150778 - protein, 9 aa, Homo Sapiens
YYKPDSPEY

SEQ ID NO: 150779 - protein, 9 aa, Homo Sapiens
YYNETHKIL

SEQ ID NO: 150780 - protein, 9 aa, Homo Sapiens
YYPEYKLLF

SEQ ID NO: 150781 - protein, 9 aa, Homo Sapiens
YYPNCEVVF

SEQ ID NO: 150782 - protein, 9 aa, Homo Sapiens
YYPNPPLVL

SEQ ID NO: 150783 - protein, 9 aa, Homo Sapiens
YYPQQAIVF

SEQ ID NO: 150784 - protein, 9 aa, Homo Sapiens
YYRAWQEYY

SEQ ID NO: 150785 - protein, 9 aa, Homo Sapiens
YYRPLHDEY

SEQ ID NO: 150786 - protein, 9 aa, Homo Sapiens
YYSGLIYTY

SEQ ID NO: 150787 - protein, 9 aa, Homo Sapiens
YYSPHGHIL

SEQ ID NO: 150788 - protein, 9 aa, Homo Sapiens
YYSPSCREF

SEQ ID NO: 150789 - protein, 9 aa, Homo Sapiens
YYTEFPTVL

SEQ ID NO: 150790 - protein, 9 aa, Homo Sapiens
YYYTKEEQF

SEQ ID NO: 150791 - protein, 10 aa, Homo Sapiens
ARSDKPIFTL

SEQ ID NO: 150792 - protein, 10 aa, Homo Sapiens
ARSENLIYTY

SEQ ID NO: 150793 - protein, 10 aa, Homo Sapiens
ARYSGSYNDY

SEQ ID NO: 150794 - protein, 10 aa, Homo Sapiens
AYMDAPKAAL

SEQ ID NO: 150795 - protein, 10 aa, Homo Sapiens
AYREHPYGRY

SEQ ID NO: 150796 - protein, 10 aa, Homo Sapiens
AYRHLVGVCY

SEQ ID NO: 150797 - protein, 10 aa, Homo Sapiens
AYRVNGQYIM

SEQ ID NO: 150798 - protein, 10 aa, Homo Sapiens
AYYEEQHPEL

SEQ ID NO: 150799 - protein, 10 aa, Homo Sapiens
ELGRSQALFL

SEQ ID NO: 150800 - protein, 10 aa, Homo Sapiens
FRGPSGLLVY

SEQ ID NO: 150801 - protein, 10 aa, Homo Sapiens
FRKDGVPIGY

SEQ ID NO: 150802 - protein, 10 aa, Homo Sapiens
FRMQEGSEVY

SEQ ID NO: 150803 - protein, 10 aa, Homo Sapiens
FRPDLSSASF

SEQ ID NO: 150804 - protein, 10 aa, Homo Sapiens
FRPDVTSSSF

SEQ ID NO: 150805 - protein, 10 aa, Homo Sapiens
FRPVPLEQTY

SEQ ID NO: 150806 - protein, 10 aa, Homo Sapiens
FRQYAKDIGF

SEQ ID NO: 150807 - protein, 10 aa, Homo Sapiens
FRSLSTTNVF

SEQ ID NO: 150808 - protein, 10 aa, Homo Sapiens
FRSPTAPSVF

SEQ ID NO: 150809 - protein, 10 aa, Homo Sapiens
FRTGNPTGTY

SEQ ID NO: 150810 - protein, 10 aa, Homo Sapiens
FRYHGLSSLC

SEQ ID NO: 150811 - protein, 10 aa, Homo Sapiens
FRYNGLSFVY

SEQ ID NO: 150812 - protein, 10 aa, Homo Sapiens
GGYRDFFPEY

SEQ ID NO: 150813 - protein, 10 aa, Homo Sapiens
GSYRDSYDSY

SEQ ID NO: 150814 - protein, 10 aa, Homo Sapiens
GSYRDSYESY

SEQ ID NO: 150815 - protein, 10 aa, Homo Sapiens
HLHNMPPSAL

SEQ ID NO: 150816 - protein, 10 aa, Homo Sapiens
HRFEQAFYTY

SEQ ID NO: 150817 - protein, 10 aa, Homo Sapiens
HRPPASEYTM

SEQ ID NO: 150818 - protein, 10 aa, Homo Sapiens
HRPPGPFPIM

SEQ ID NO: 150819 - protein, 10 aa, Homo Sapiens
IREEYPDRIM

SEQ ID NO: 150820 - protein, 10 aa, Homo Sapiens
IYPGYHQSSY

SEQ ID NO: 150821 - protein, 10 aa, Homo Sapiens
IYPSVDKREY

SEQ ID NO: 150822 - protein, 10 aa, Homo Sapiens
KRHEMPPHIY

SEQ ID NO: 150823 - protein, 10 aa, Homo Sapiens
KRNGVIIAGY

SEQ ID NO: 150824 - protein, 10 aa, Homo Sapiens
KYFDSGDYNM

SEQ ID NO: 150825 - protein, 10 aa, Homo Sapiens
LRAPCLPVTY

SEQ ID NO: 150826 - protein, 10 aa, Homo Sapiens
LYWSHPRKFG

SEQ ID NO: 150827 - protein, 10 aa, Homo Sapiens
MRTIATALEY

SEQ ID NO: 150828 - protein, 10 aa, Homo Sapiens
NKKTVSIPSY

SEQ ID NO: 150829 - protein, 10 aa, Homo Sapiens
NRFAGFGIGL

SEQ ID NO: 150830 - protein, 10 aa, Homo Sapiens
NRIGGRIFTY

SEQ ID NO: 150831 - protein, 10 aa, Homo Sapiens
NRPAPVEVSY

SEQ ID NO: 150832 - protein, 10 aa, Homo Sapiens
NRPAPVEVTY

SEQ ID NO: 150833 - protein, 10 aa, Homo Sapiens
NRPDVLDTAL

SEQ ID NO: 150834 - protein, 10 aa, Homo Sapiens
NRVLVVHDGF

SEQ ID NO: 150835 - protein, 10 aa, Homo Sapiens
NRVPAGNWVL

SEQ ID NO: 150836 - protein, 10 aa, Homo Sapiens
NRYDGQVAVF

SEQ ID NO: 150837 - protein, 10 aa, Homo Sapiens
NTVDILLHHI

SEQ ID NO: 150838 - protein, 10 aa, Homo Sapiens
NYRTPNFQSY

SEQ ID NO: 150839 - protein, 10 aa, Homo Sapiens
QYGSEGRFTF

SEQ ID NO: 150840 - protein, 10 aa, Homo Sapiens
RRFDAMPFTL

SEQ ID NO: 150841 - protein, 10 aa, Homo Sapiens
RRSDPGHYSF

SEQ ID NO: 150842 - protein, 10 aa, Homo Sapiens
RRSINQPVAF

SEQ ID NO: 150843 - protein, 10 aa, Homo Sapiens
RYIDRIHIFF

SEQ ID NO: 150844 - protein, 10 aa, Homo Sapiens
RYREDLDFVL

SEQ ID NO: 150845 - protein, 10 aa, Homo Sapiens
SRADQFEYVM

SEQ ID NO: 150846 - protein, 10 aa, Homo Sapiens
SRAFQPSVSL

SEQ ID NO: 150847 - protein, 10 aa, Homo Sapiens
SREGRPIWQL

SEQ ID NO: 150848 - protein, 10 aa, Homo Sapiens
SRGPGTSFEF

SEQ ID NO: 150849 - protein, 10 aa, Homo Sapiens
SRHSGPFFTF

SEQ ID NO: 150850 - protein, 10 aa, Homo Sapiens
SRPPIIVSEF

SEQ ID NO: 150851 - protein, 10 aa, Homo Sapiens
SRYDGQIAVF

SEQ ID NO: 150852 - protein, 10 aa, Homo Sapiens
SYPERPIIFL

SEQ ID NO: 150853 - protein, 10 aa, Homo Sapiens
SYVTTSTRTY

SEQ ID NO: 150854 - protein, 10 aa, Homo Sapiens
TRTEPINTTY

SEQ ID NO: 150855 - protein, 10 aa, Homo Sapiens
TYPDRGQCHL

SEQ ID NO: 150856 - protein, 10 aa, Homo Sapiens
VAPVGSGSAL

SEQ ID NO: 150857 - protein, 10 aa, Homo Sapiens
VLSAADKGNV

SEQ ID NO: 150858 - protein, 10 aa, Homo Sapiens
VRFDSDVGEY

SEQ ID NO: 150859 - protein, 10 aa, Homo Sapiens
VRFDVHDVTL

SEQ ID NO: 150860 - protein, 10 aa, Homo Sapiens
VRGDGPWYYY

SEQ ID NO: 150861 - protein, 10 aa, Homo Sapiens
VRPCVSIEGY

SEQ ID NO: 150862 - protein, 10 aa, Homo Sapiens
VRPEQPFIVL

SEQ ID NO: 150863 - protein, 10 aa, Homo Sapiens
YKRPVLLIEF

SEQ ID NO: 150864 - protein, 10 aa, Homo Sapiens
YRIPSTPDSF

SEQ ID NO: 150865 - protein, 10 aa, Homo Sapiens
YRNPKGFSTL

SEQ ID NO: 150866 - protein, 10 aa, Homo Sapiens
YRPETGSWVF

SEQ ID NO: 150867 - protein, 10 aa, Homo Sapiens
YRPPPVLDAL

SEQ ID NO: 150868 - protein, 10 aa, Homo Sapiens
YRYDGQHFSL

SEQ ID NO: 150869 - protein, 10 aa, Homo Sapiens
YYRYPTGESY

SEQ ID NO: 150870 - protein, 10 aa, Homo Sapiens
YYYDGDIGNY

SEQ ID NO: 150871 - protein, 10 aa, Homo Sapiens
YYYDGDVGNY

SEQ ID NO: 150872 - protein, 10 aa, Homo Sapiens
YYYGKFMPVG

SEQ ID NO: 150873 - protein, 11 aa, Homo Sapiens
ARLDHKFDLMY

SEQ ID NO: 150874 - protein, 11 aa, Homo Sapiens
ARPDEKAIMTY

SEQ ID NO: 150875 - protein, 11 aa, Homo Sapiens
ARYSGSYNDYL

SEQ ID NO: 150876 - protein, 11 aa, Homo Sapiens
AVEAKKTYVRD

SEQ ID NO: 150877 - protein, 11 aa, Homo Sapiens
FRHDSGYEVHH

SEQ ID NO: 150878 - protein, 11 aa, Homo Sapiens
FRLAQEGIYTL

SEQ ID NO: 150879 - protein, 11 aa, Homo Sapiens
FRPDEPYYYGY

SEQ ID NO: 150880 - protein, 11 aa, Homo Sapiens
GGSYRDSYDSY

SEQ ID NO: 150881 - protein, 11 aa, Homo Sapiens
HRFSYDTFVDY

SEQ ID NO: 150882 - protein, 11 aa, Homo Sapiens
HYRPPEVILEL

SEQ ID NO: 150883 - protein, 11 aa, Homo Sapiens
KYFDKASYRVY

SEQ ID NO: 150884 - protein, 11 aa, Homo Sapiens
KYLDEDTIYHL

SEQ ID NO: 150885 - protein, 11 aa, Homo Sapiens
MKVELCSFSGY

SEQ ID NO: 150886 - protein, 11 aa, Homo Sapiens
NRPDIIDPAIL

SEQ ID NO: 150887 - protein, 11 aa, Homo Sapiens
PHRYRPGTVAL

SEQ ID NO: 150888 - protein, 11 aa, Homo Sapiens
SGPSIVHRKCF

SEQ ID NO: 150889 - protein, 11 aa, Homo Sapiens
SRKESYSIYVY

SEQ ID NO: 150890 - protein, 11 aa, Homo Sapiens
SRKESYSVYVY

SEQ ID NO: 150891 - protein, 11 aa, Homo Sapiens
SYYDRGYDRGY

SEQ ID NO: 150892 - protein, 11 aa, Homo Sapiens
VRPDTNIFTVY

SEQ ID NO: 150893 - protein, 11 aa, Homo Sapiens
VRTDITYPAGF

SEQ ID NO: 150894 - protein, 11 aa, Homo Sapiens
YRADTQTYQPY

SEQ ID NO: 150895 - protein, 11 aa, Homo Sapiens
YRATENDIYNF

SEQ ID NO: 150896 - protein, 11 aa, Homo Sapiens
YRGPAGDATVA

SEQ ID NO: 150897 - protein, 11 aa, Homo Sapiens
YRRLPDAHSDY

SEQ ID NO: 150898 - protein, 11 aa, Homo Sapiens
YRVTLNPPGTF

SEQ ID NO: 150899 - protein, 11 aa, Homo Sapiens
YYDGDVGNYYY

SEQ ID NO: 150900 - protein, 11 aa, Homo Sapiens
YYSPHGHILVL

SEQ ID NO: 150901 - protein, 8 aa, Homo Sapiens
AAAPPLTL

SEQ ID NO: 150902 - protein, 8 aa, Homo Sapiens
AAGPGFSL

SEQ ID NO: 150903 - protein, 8 aa, Homo Sapiens
AAGRPLEL

SEQ ID NO: 150904 - protein, 8 aa, Homo Sapiens
AAGVVLEM

SEQ ID NO: 150905 - protein, 8 aa, Homo Sapiens
ADFETVRM

SEQ ID NO: 150906 - protein, 8 aa, Homo Sapiens
ADFLVYEF

SEQ ID NO: 150907 - protein, 8 aa, Homo Sapiens
ADIVATGF

SEQ ID NO: 150908 - protein, 8 aa, Homo Sapiens
ADQIVTKL

SEQ ID NO: 150909 - protein, 8 aa, Homo Sapiens
AEMVRHAL

SEQ ID NO: 150910 - protein, 8 aa, Homo Sapiens
AEMYVAKF

SEQ ID NO: 150911 - protein, 8 aa, Homo Sapiens
AEPIKQAF

SEQ ID NO: 150912 - protein, 8 aa, Homo Sapiens
AGGHPLEL

SEQ ID NO: 150913 - protein, 8 aa, Homo Sapiens
AGGRVFVL

SEQ ID NO: 150914 - protein, 8 aa, Homo Sapiens
ASGMILVM

SEQ ID NO: 150915 - protein, 8 aa, Homo Sapiens
ASGQAFEL

SEQ ID NO: 150916 - protein, 8 aa, Homo Sapiens
ASLTVMVL

SEQ ID NO: 150917 - protein, 8 aa, Homo Sapiens
AVGIALVM

SEQ ID NO: 150918 - protein, 8 aa, Homo Sapiens
AVGKHFEL

SEQ ID NO: 150919 - protein, 8 aa, Homo Sapiens
AVGPDLYL

SEQ ID NO: 150920 - protein, 8 aa, Homo Sapiens
AVGPIVQL

SEQ ID NO: 150921 - protein, 8 aa, Homo Sapiens
CSGAIIVL

SEQ ID NO: 150922 - protein, 8 aa, Homo Sapiens
EEQLQQIR

SEQ ID NO: 150923 - protein, 8 aa, Homo Sapiens
FAGMPITL

SEQ ID NO: 150924 - protein, 8 aa, Homo Sapiens
FIGYPITL

SEQ ID NO: 150925 - protein, 8 aa, Homo Sapiens
FNEKSKEL

SEQ ID NO: 150926 - protein, 8 aa, Homo Sapiens
FSGPAITL

SEQ ID NO: 150927 - protein, 8 aa, Homo Sapiens
FSPVGSVL

SEQ ID NO: 150928 - protein, 8 aa, Homo Sapiens
FVGLDIEM

SEQ ID NO: 150929 - protein, 8 aa, Homo Sapiens
FVGQTVEL

SEQ ID NO: 150930 - protein, 8 aa, Homo Sapiens
FYQEHPDL

SEQ ID NO: 150931 - protein, 8 aa, Homo Sapiens
GDTLVTGF

SEQ ID NO: 150932 - protein, 8 aa, Homo Sapiens
HDKLSHYL

SEQ ID NO: 150933 - protein, 8 aa, Homo Sapiens
HDVPHQPF

SEQ ID NO: 150934 - protein, 8 aa, Homo Sapiens
HSGPIHVL

SEQ ID NO: 150935 - protein, 8 aa, Homo Sapiens
HVGTEVVL

SEQ ID NO: 150936 - protein, 8 aa, Homo Sapiens
HYNNIMAL

SEQ ID NO: 150937 - protein, 8 aa, Homo Sapiens
ILGPTFTL

SEQ ID NO: 150938 - protein, 8 aa, Homo Sapiens
ISGITMVL

SEQ ID NO: 150939 - protein, 8 aa, Homo Sapiens
ITGVDIVM

SEQ ID NO: 150940 - protein, 8 aa, Homo Sapiens
ITGVVITL

SEQ ID NO: 150941 - protein, 8 aa, Homo Sapiens
IVGPLVEM

SEQ ID NO: 150942 - protein, 8 aa, Homo Sapiens
IVGPVVGL

SEQ ID NO: 150943 - protein, 8 aa, Homo Sapiens
IVGVVVVV

SEQ ID NO: 150944 - protein, 8 aa, Homo Sapiens
KDSMIRKF

SEQ ID NO: 150945 - protein, 8 aa, Homo Sapiens
KDSYVVAF

SEQ ID NO: 150946 - protein, 8 aa, Homo Sapiens
KDVVIHRF

SEQ ID NO: 150947 - protein, 8 aa, Homo Sapiens
LAETEGRY

SEQ ID NO: 150948 - protein, 8 aa, Homo Sapiens
LAGPALEL

SEQ ID NO: 150949 - protein, 8 aa, Homo Sapiens
LDSVHQLL

SEQ ID NO: 150950 - protein, 8 aa, Homo Sapiens
LGGIPIAI

SEQ ID NO: 150951 - protein, 8 aa, Homo Sapiens
LGGIVVVL

SEQ ID NO: 150952 - protein, 8 aa, Homo Sapiens
LNNMRSQY

SEQ ID NO: 150953 - protein, 8 aa, Homo Sapiens
LQGVVVVL

SEQ ID NO: 150954 - protein, 8 aa, Homo Sapiens
LSGTVVEL

SEQ ID NO: 150955 - protein, 8 aa, Homo Sapiens
LTGCVLVL

SEQ ID NO: 150956 - protein, 8 aa, Homo Sapiens
LTVGDLVM

SEQ ID NO: 150957 - protein, 8 aa, Homo Sapiens
LVGACITL

SEQ ID NO: 150958 - protein, 8 aa, Homo Sapiens
LVGPQIYL

SEQ ID NO: 150959 - protein, 8 aa, Homo Sapiens
MVGTVVVL

SEQ ID NO: 150960 - protein, 8 aa, Homo Sapiens
NRGVIITM

SEQ ID NO: 150961 - protein, 8 aa, Homo Sapiens
NSGVPVYL

SEQ ID NO: 150962 - protein, 8 aa, Homo Sapiens
QLAHSVVL

SEQ ID NO: 150963 - protein, 8 aa, Homo Sapiens
QSGIVILL

SEQ ID NO: 150964 - protein, 8 aa, Homo Sapiens
RDALKTEF

SEQ ID NO: 150965 - protein, 8 aa, Homo Sapiens
RDFAARLV

SEQ ID NO: 150966 - protein, 8 aa, Homo Sapiens
RDFNHINV

SEQ ID NO: 150967 - protein, 8 aa, Homo Sapiens
RDFTVSAM

SEQ ID NO: 150968 - protein, 8 aa, Homo Sapiens
RDFVARNV

SEQ ID NO: 150969 - protein, 8 aa, Homo Sapiens
RDHIHVHF

SEQ ID NO: 150970 - protein, 8 aa, Homo Sapiens
RDHIKDSF

SEQ ID NO: 150971 - protein, 8 aa, Homo Sapiens
RDHLRVNL

SEQ ID NO: 150972 - protein, 8 aa, Homo Sapiens
RDLIHTGV

SEQ ID NO: 150973 - protein, 8 aa, Homo Sapiens
RDLLTRRL

SEQ ID NO: 150974 - protein, 8 aa, Homo Sapiens
RDNYVPEV

SEQ ID NO: 150975 - protein, 8 aa, Homo Sapiens
RDSLVERL

SEQ ID NO: 150976 - protein, 8 aa, Homo Sapiens
RDTYVSSF

SEQ ID NO: 150977 - protein, 8 aa, Homo Sapiens
RDWFSSQL

SEQ ID NO: 150978 - protein, 8 aa, Homo Sapiens
RDWYKRNF

SEQ ID NO: 150979 - protein, 8 aa, Homo Sapiens
RDYVRYRL

SEQ ID NO: 150980 - protein, 8 aa, Homo Sapiens
REALVKKF

SEQ ID NO: 150981 - protein, 8 aa, Homo Sapiens
REHPVPLL

SEQ ID NO: 150982 - protein, 8 aa, Homo Sapiens
REIIINAV

SEQ ID NO: 150983 - protein, 8 aa, Homo Sapiens
REKEWQRL

SEQ ID NO: 150984 - protein, 8 aa, Homo Sapiens
RELVAHHL

SEQ ID NO: 150985 - protein, 8 aa, Homo Sapiens
REYYVNQF

SEQ ID NO: 150986 - protein, 8 aa, Homo Sapiens
SDTLKTYF

SEQ ID NO: 150987 - protein, 8 aa, Homo Sapiens
SYGLNIEM

SEQ ID NO: 150988 - protein, 8 aa, Homo Sapiens
TDFISHLF

SEQ ID NO: 150989 - protein, 8 aa, Homo Sapiens
TDGKVFQF

SEQ ID NO: 150990 - protein, 8 aa, Homo Sapiens
TDLLKTGF

SEQ ID NO: 150991 - protein, 8 aa, Homo Sapiens
TEELAYLK

SEQ ID NO: 150992 - protein, 8 aa, Homo Sapiens
TRGPVVRL

SEQ ID NO: 150993 - protein, 8 aa, Homo Sapiens
TSGIVLVL

SEQ ID NO: 150994 - protein, 8 aa, Homo Sapiens
TSGPPLTM

SEQ ID NO: 150995 - protein, 8 aa, Homo Sapiens
TSGVALTL

SEQ ID NO: 150996 - protein, 8 aa, Homo Sapiens
TTGPIFSM

SEQ ID NO: 150997 - protein, 8 aa, Homo Sapiens
TVGPVQKL

SEQ ID NO: 150998 - protein, 8 aa, Homo Sapiens
TVGVDFAL

SEQ ID NO: 150999 - protein, 8 aa, Homo Sapiens
TVGVIVRL

SEQ ID NO: 151000 - protein, 8 aa, Homo Sapiens
VAGAVFTL

SEQ ID NO: 151001 - protein, 8 aa, Homo Sapiens
VGGPEIEL

SEQ ID NO: 151002 - protein, 8 aa, Homo Sapiens
VGGVPVTL

SEQ ID NO: 151003 - protein, 8 aa, Homo Sapiens
VIGPPVVL

SEQ ID NO: 151004 - protein, 8 aa, Homo Sapiens
VSLTACKV

SEQ ID NO: 151005 - protein, 8 aa, Homo Sapiens
VTDTNVIL

SEQ ID NO: 151006 - protein, 8 aa, Homo Sapiens
VVGPNITL

SEQ ID NO: 151007 - protein, 8 aa, Homo Sapiens
YDNPHEAL

SEQ ID NO: 151008 - protein, 8 aa, Homo Sapiens
YDSVKVYF

SEQ ID NO: 151009 - protein, 8 aa, Homo Sapiens
YEDIAQKS

SEQ ID NO: 151010 - protein, 8 aa, Homo Sapiens
YQGIAVVM

SEQ ID NO: 151011 - protein, 8 aa, Homo Sapiens
YQGVLVEL

SEQ ID NO: 151012 - protein, 8 aa, Homo Sapiens
YSGVLITL

SEQ ID NO: 151013 - protein, 8 aa, Homo Sapiens
YSNKEIFL

SEQ ID NO: 151014 - protein, 8 aa, Homo Sapiens
YVGPSLRM

SEQ ID NO: 151015 - protein, 8 aa, Homo Sapiens
YVGVVHRL

SEQ ID NO: 151016 - protein, 9 aa, Homo Sapiens
AAAGSPVFL

SEQ ID NO: 151017 - protein, 9 aa, Homo Sapiens
AAAHFYFEL

SEQ ID NO: 151018 - protein, 9 aa, Homo Sapiens
AAAPHLLLL

SEQ ID NO: 151019 - protein, 9 aa, Homo Sapiens
AAAPSLLIL

SEQ ID NO: 151020 - protein, 9 aa, Homo Sapiens
AAASHFFNL

SEQ ID NO: 151021 - protein, 9 aa, Homo Sapiens
AAAVQAFYL

SEQ ID NO: 151022 - protein, 9 aa, Homo Sapiens
AAGSHVIIL

SEQ ID NO: 151023 - protein, 9 aa, Homo Sapiens
AAHDALVEL

SEQ ID NO: 151024 - protein, 9 aa, Homo Sapiens
AAHPGPIVV

SEQ ID NO: 151025 - protein, 9 aa, Homo Sapiens
AAHTQATLL

SEQ ID NO: 151026 - protein, 9 aa, Homo Sapiens
AAHVSRVIL

SEQ ID NO: 151027 - protein, 9 aa, Homo Sapiens
AAIASLLYL

SEQ ID NO: 151028 - protein, 9 aa, Homo Sapiens
AAIDHQIEV

SEQ ID NO: 151029 - protein, 9 aa, Homo Sapiens
AAIWFRTYL

SEQ ID NO: 151030 - protein, 9 aa, Homo Sapiens
AAIYHVLHF

SEQ ID NO: 151031 - protein, 9 aa, Homo Sapiens
AALDKATVL

SEQ ID NO: 151032 - protein, 9 aa, Homo Sapiens
AALPKATIL

SEQ ID NO: 151033 - protein, 9 aa, Homo Sapiens
AAMDAEIVL

SEQ ID NO: 151034 - protein, 9 aa, Homo Sapiens
AAMKNVTEL

SEQ ID NO: 151035 - protein, 9 aa, Homo Sapiens
AAMSHLLEM

SEQ ID NO: 151036 - protein, 9 aa, Homo Sapiens
AANKTIIYL

SEQ ID NO: 151037 - protein, 9 aa, Homo Sapiens
AANPHSFVF

SEQ ID NO: 151038 - protein, 9 aa, Homo Sapiens
AANPIQFTL

SEQ ID NO: 151039 - protein, 9 aa, Homo Sapiens
AANTSTVEL

SEQ ID NO: 151040 - protein, 9 aa, Homo Sapiens
AAPAYSRAL

SEQ ID NO: 151041 - protein, 9 aa, Homo Sapiens
AAPVPTTTL

SEQ ID NO: 151042 - protein, 9 aa, Homo Sapiens
AAQQHETFL

SEQ ID NO: 151043 - protein, 9 aa, Homo Sapiens
AASKVMVEL

SEQ ID NO: 151044 - protein, 9 aa, Homo Sapiens
AASPSELHL

SEQ ID NO: 151045 - protein, 9 aa, Homo Sapiens
AATGHTVVL

SEQ ID NO: 151046 - protein, 9 aa, Homo Sapiens
AATGVVLDL

SEQ ID NO: 151047 - protein, 9 aa, Homo Sapiens
AATSVHVVA

SEQ ID NO: 151048 - protein, 9 aa, Homo Sapiens
AATVFCVVL

SEQ ID NO: 151049 - protein, 9 aa, Homo Sapiens
AAVEEGIVL

SEQ ID NO: 151050 - protein, 9 aa, Homo Sapiens
AAVGHVLVV

SEQ ID NO: 151051 - protein, 9 aa, Homo Sapiens
AAVNHISQL

SEQ ID NO: 151052 - protein, 9 aa, Homo Sapiens
ADALRPSVV

SEQ ID NO: 151053 - protein, 9 aa, Homo Sapiens
ADHIRSIHV

SEQ ID NO: 151054 - protein, 9 aa, Homo Sapiens
ADLERFFNF

SEQ ID NO: 151055 - protein, 9 aa, Homo Sapiens
ADLERVLGL

SEQ ID NO: 151056 - protein, 9 aa, Homo Sapiens
ADLYRVLGV

SEQ ID NO: 151057 - protein, 9 aa, Homo Sapiens
ADMAHISGL

SEQ ID NO: 151058 - protein, 9 aa, Homo Sapiens
ADNLRLIQV

SEQ ID NO: 151059 - protein, 9 aa, Homo Sapiens
ADQLRFSYL

SEQ ID NO: 151060 - protein, 9 aa, Homo Sapiens
ADSKRAFEL

SEQ ID NO: 151061 - protein, 9 aa, Homo Sapiens
ADSLRLQQL

SEQ ID NO: 151062 - protein, 9 aa, Homo Sapiens
ADSQRFRQF

SEQ ID NO: 151063 - protein, 9 aa, Homo Sapiens
ADVLKVEVF

SEQ ID NO: 151064 - protein, 9 aa, Homo Sapiens
AEAQRFARM

SEQ ID NO: 151065 - protein, 9 aa, Homo Sapiens
AELERNVAL

SEQ ID NO: 151066 - protein, 9 aa, Homo Sapiens
AELQRVQKV

SEQ ID NO: 151067 - protein, 9 aa, Homo Sapiens
AESLRYKLL

SEQ ID NO: 151068 - protein, 9 aa, Homo Sapiens
AEYIRTEML

SEQ ID NO: 151069 - protein, 9 aa, Homo Sapiens
AGADHIITM

SEQ ID NO: 151070 - protein, 9 aa, Homo Sapiens
AGAYHAVVL

SEQ ID NO: 151071 - protein, 9 aa, Homo Sapiens
AGHDQVVVL

SEQ ID NO: 151072 - protein, 9 aa, Homo Sapiens
AGHPHIITL

SEQ ID NO: 151073 - protein, 9 aa, Homo Sapiens
AGLTHIITM

SEQ ID NO: 151074 - protein, 9 aa, Homo Sapiens
AGMPTAYDL

SEQ ID NO: 151075 - protein, 9 aa, Homo Sapiens
AGQDAVIVL

SEQ ID NO: 151076 - protein, 9 aa, Homo Sapiens
AGQEAIFIL

SEQ ID NO: 151077 - protein, 9 aa, Homo Sapiens
AGQESPIIL

SEQ ID NO: 151078 - protein, 9 aa, Homo Sapiens
AGSPFHPAM

SEQ ID NO: 151079 - protein, 9 aa, Homo Sapiens
AGSPHALEM

SEQ ID NO: 151080 - protein, 9 aa, Homo Sapiens
AGVDHRVIL

SEQ ID NO: 151081 - protein, 9 aa, Homo Sapiens
AIHTAILTL

SEQ ID NO: 151082 - protein, 9 aa, Homo Sapiens
AIMPYCLHL

SEQ ID NO: 151083 - protein, 9 aa, Homo Sapiens
AINELLVEL

SEQ ID NO: 151084 - protein, 9 aa, Homo Sapiens
AIQEHPVVL

SEQ ID NO: 151085 - protein, 9 aa, Homo Sapiens
ALHHAVIFL

SEQ ID NO: 151086 - protein, 9 aa, Homo Sapiens
ALMYHTITL

SEQ ID NO: 151087 - protein, 9 aa, Homo Sapiens
ALPFFVITM

SEQ ID NO: 151088 - protein, 9 aa, Homo Sapiens
ALPSHVVTM

SEQ ID NO: 151089 - protein, 9 aa, Homo Sapiens
ALTPVVVTL

SEQ ID NO: 151090 - protein, 9 aa, Homo Sapiens
ARANQAIQM

SEQ ID NO: 151091 - protein, 9 aa, Homo Sapiens
ARHELQVEM

SEQ ID NO: 151092 - protein, 9 aa, Homo Sapiens
ARLKDIIVM

SEQ ID NO: 151093 - protein, 9 aa, Homo Sapiens
ARNDYLLTL

SEQ ID NO: 151094 - protein, 9 aa, Homo Sapiens
ARPKSAFKV

SEQ ID NO: 151095 - protein, 9 aa, Homo Sapiens
ARPPFVICV

SEQ ID NO: 151096 - protein, 9 aa, Homo Sapiens
ASADTAYVL

SEQ ID NO: 151097 - protein, 9 aa, Homo Sapiens
ASATVHIRM

SEQ ID NO: 151098 - protein, 9 aa, Homo Sapiens
ASHDSTLSL

SEQ ID NO: 151099 - protein, 9 aa, Homo Sapiens
ASSFVFLNL

SEQ ID NO: 151100 - protein, 9 aa, Homo Sapiens
ASSPHGLVM

SEQ ID NO: 151101 - protein, 9 aa, Homo Sapiens
ASTCVIIKL

SEQ ID NO: 151102 - protein, 9 aa, Homo Sapiens
ASVPAALAS

SEQ ID NO: 151103 - protein, 9 aa, Homo Sapiens
ATAPQAPVM

SEQ ID NO: 151104 - protein, 9 aa, Homo Sapiens
ATGNYIIIM

SEQ ID NO: 151105 - protein, 9 aa, Homo Sapiens
ATMGHWILL

SEQ ID NO: 151106 - protein, 9 aa, Homo Sapiens
ATPDHVLFM

SEQ ID NO: 151107 - protein, 9 aa, Homo Sapiens
ATSNVAISV

SEQ ID NO: 151108 - protein, 9 aa, Homo Sapiens
AVGAVPVVL

SEQ ID NO: 151109 - protein, 9 aa, Homo Sapiens
AVIEAEHTL

SEQ ID NO: 151110 - protein, 9 aa, Homo Sapiens
AVIESVTFL

SEQ ID NO: 151111 - protein, 9 aa, Homo Sapiens
AVMEEKTIL

SEQ ID NO: 151112 - protein, 9 aa, Homo Sapiens
AVMLHSFTL

SEQ ID NO: 151113 - protein, 9 aa, Homo Sapiens
AVNPHLFSL

SEQ ID NO: 151114 - protein, 9 aa, Homo Sapiens
AVQEKVFEL

SEQ ID NO: 151115 - protein, 9 aa, Homo Sapiens
AVSNHVFHL

SEQ ID NO: 151116 - protein, 9 aa, Homo Sapiens
AVSNHVFQL

SEQ ID NO: 151117 - protein, 9 aa, Homo Sapiens
AVSPVDLNL

SEQ ID NO: 151118 - protein, 9 aa, Homo Sapiens
AVSPYSIVL

SEQ ID NO: 151119 - protein, 9 aa, Homo Sapiens
AVTEHCITL

SEQ ID NO: 151120 - protein, 9 aa, Homo Sapiens
AVVAHAYYL

SEQ ID NO: 151121 - protein, 9 aa, Homo Sapiens
AYSEAIFEL

SEQ ID NO: 151122 - protein, 9 aa, Homo Sapiens
CAPRRKVAL

SEQ ID NO: 151123 - protein, 9 aa, Homo Sapiens
CGANHTLVL

SEQ ID NO: 151124 - protein, 9 aa, Homo Sapiens
CSSPHALVL

SEQ ID NO: 151125 - protein, 9 aa, Homo Sapiens
EDLIHEIAF

SEQ ID NO: 151126 - protein, 9 aa, Homo Sapiens
EDQLRGAGF

SEQ ID NO: 151127 - protein, 9 aa, Homo Sapiens
EELPHIHAF

SEQ ID NO: 151128 - protein, 9 aa, Homo Sapiens
FAFPGEILM

SEQ ID NO: 151129 - protein, 9 aa, Homo Sapiens
FAHPYQYEL

SEQ ID NO: 151130 - protein, 9 aa, Homo Sapiens
FAIHKKIVL

SEQ ID NO: 151131 - protein, 9 aa, Homo Sapiens
FAIPGSIFL

SEQ ID NO: 151132 - protein, 9 aa, Homo Sapiens
FALSGPLFL

SEQ ID NO: 151133 - protein, 9 aa, Homo Sapiens
FAMPYFIQV

SEQ ID NO: 151134 - protein, 9 aa, Homo Sapiens
FAPYHLVLL

SEQ ID NO: 151135 - protein, 9 aa, Homo Sapiens
FAQEALTVL

SEQ ID NO: 151136 - protein, 9 aa, Homo Sapiens
FASEYPLIL

SEQ ID NO: 151137 - protein, 9 aa, Homo Sapiens
FASHVSPEV

SEQ ID NO: 151138 - protein, 9 aa, Homo Sapiens
FASVVDIKL

SEQ ID NO: 151139 - protein, 9 aa, Homo Sapiens
FATTSPLVL

SEQ ID NO: 151140 - protein, 9 aa, Homo Sapiens
FGAGHLICL

SEQ ID NO: 151141 - protein, 9 aa, Homo Sapiens
FGSEFSPEL

SEQ ID NO: 151142 - protein, 9 aa, Homo Sapiens
FIGSHVIEL

SEQ ID NO: 151143 - protein, 9 aa, Homo Sapiens
FKPETYWVL

SEQ ID NO: 151144 - protein, 9 aa, Homo Sapiens
FLPDHPIVL

SEQ ID NO: 151145 - protein, 9 aa, Homo Sapiens
FLPDLQITM

SEQ ID NO: 151146 - protein, 9 aa, Homo Sapiens
FLPQKIIYL

SEQ ID NO: 151147 - protein, 9 aa, Homo Sapiens
FLPYHVLLL

SEQ ID NO: 151148 - protein, 9 aa, Homo Sapiens
FLSHIPITL

SEQ ID NO: 151149 - protein, 9 aa, Homo Sapiens
FLVEHVLTL

SEQ ID NO: 151150 - protein, 9 aa, Homo Sapiens
FNDPNAKEM

SEQ ID NO: 151151 - protein, 9 aa, Homo Sapiens
FNHPEIVQL

SEQ ID NO: 151152 - protein, 9 aa, Homo Sapiens
FQMPTPIQM

SEQ ID NO: 151153 - protein, 9 aa, Homo Sapiens
FQNPSTVTL

SEQ ID NO: 151154 - protein, 9 aa, Homo Sapiens
FRCPSNHQM

SEQ ID NO: 151155 - protein, 9 aa, Homo Sapiens
FRHPHIIKL

SEQ ID NO: 151156 - protein, 9 aa, Homo Sapiens
FRLPTAEVM

SEQ ID NO: 151157 - protein, 9 aa, Homo Sapiens
FRMDHEFVA

SEQ ID NO: 151158 - protein, 9 aa, Homo Sapiens
FRNPLAPAV

SEQ ID NO: 151159 - protein, 9 aa, Homo Sapiens
FRPPNPWTM

SEQ ID NO: 151160 - protein, 9 aa, Homo Sapiens
FRQDFHSEM

SEQ ID NO: 151161 - protein, 9 aa, Homo Sapiens
FRQIIAVVL

SEQ ID NO: 151162 - protein, 9 aa, Homo Sapiens
FRTDGHPVM

SEQ ID NO: 151163 - protein, 9 aa, Homo Sapiens
FRVDYILSV

SEQ ID NO: 151164 - protein, 9 aa, Homo Sapiens
FRVPTANVS

SEQ ID NO: 151165 - protein, 9 aa, Homo Sapiens
FSHAQTVVL

SEQ ID NO: 151166 - protein, 9 aa, Homo Sapiens
FSSDVTHEM

SEQ ID NO: 151167 - protein, 9 aa, Homo Sapiens
FSSPVCMAF

SEQ ID NO: 151168 - protein, 9 aa, Homo Sapiens
FTLSHITQL

SEQ ID NO: 151169 - protein, 9 aa, Homo Sapiens
FTVPHTHVF

SEQ ID NO: 151170 - protein, 9 aa, Homo Sapiens
FVAETHIVL

SEQ ID NO: 151171 - protein, 9 aa, Homo Sapiens
FVANAIIHL

SEQ ID NO: 151172 - protein, 9 aa, Homo Sapiens
FVDPAQITM

SEQ ID NO: 151173 - protein, 9 aa, Homo Sapiens
FVEPFVILL

SEQ ID NO: 151174 - protein, 9 aa, Homo Sapiens
FVFPGELLL

SEQ ID NO: 151175 - protein, 9 aa, Homo Sapiens
FVGQNVLIL

SEQ ID NO: 151176 - protein, 9 aa, Homo Sapiens
FVHDLVLYL

SEQ ID NO: 151177 - protein, 9 aa, Homo Sapiens
FVHPDPLWI

SEQ ID NO: 151178 - protein, 9 aa, Homo Sapiens
FVHPKPVSL

SEQ ID NO: 151179 - protein, 9 aa, Homo Sapiens
FVHQGETEL

SEQ ID NO: 151180 - protein, 9 aa, Homo Sapiens
FVHTGVYNL

SEQ ID NO: 151181 - protein, 9 aa, Homo Sapiens
FVMETFVHL

SEQ ID NO: 151182 - protein, 9 aa, Homo Sapiens
FVNPVQVVL

SEQ ID NO: 151183 - protein, 9 aa, Homo Sapiens
FVNSYPVTM

SEQ ID NO: 151184 - protein, 9 aa, Homo Sapiens
FVPLHHFYL

SEQ ID NO: 151185 - protein, 9 aa, Homo Sapiens
FVTPKVIKL

SEQ ID NO: 151186 - protein, 9 aa, Homo Sapiens
FVVDHVIKI

SEQ ID NO: 151187 - protein, 9 aa, Homo Sapiens
FVVEHDFIM

SEQ ID NO: 151188 - protein, 9 aa, Homo Sapiens
FVVPYGTPL

SEQ ID NO: 151189 - protein, 9 aa, Homo Sapiens
FYAELYHII

SEQ ID NO: 151190 - protein, 9 aa, Homo Sapiens
FYNERVVIM

SEQ ID NO: 151191 - protein, 9 aa, Homo Sapiens
FYQPTCIVL

SEQ ID NO: 151192 - protein, 9 aa, Homo Sapiens
FYRPHTITL

SEQ ID NO: 151193 - protein, 9 aa, Homo Sapiens
GAHSFVLTL

SEQ ID NO: 151194 - protein, 9 aa, Homo Sapiens
GDLQRELNL

SEQ ID NO: 151195 - protein, 9 aa, Homo Sapiens
GDLSHIHRL

SEQ ID NO: 151196 - protein, 9 aa, Homo Sapiens
GDLVKKESF

SEQ ID NO: 151197 - protein, 9 aa, Homo Sapiens
GDYIRTGFI

SEQ ID NO: 151198 - protein, 9 aa, Homo Sapiens
GDYLRVWRV

SEQ ID NO: 151199 - protein, 9 aa, Homo Sapiens
GELKRRLGL

SEQ ID NO: 151200 - protein, 9 aa, Homo Sapiens
GEMPRHMQL

SEQ ID NO: 151201 - protein, 9 aa, Homo Sapiens
GGPGGVGGL

SEQ ID NO: 151202 - protein, 9 aa, Homo Sapiens
GGSNVHIIL

SEQ ID NO: 151203 - protein, 9 aa, Homo Sapiens
GILSPSIVL

SEQ ID NO: 151204 - protein, 9 aa, Homo Sapiens
GLHGWAFTL

SEQ ID NO: 151205 - protein, 9 aa, Homo Sapiens
GRMVQVHEL

SEQ ID NO: 151206 - protein, 9 aa, Homo Sapiens
GRNALEIVM

SEQ ID NO: 151207 - protein, 9 aa, Homo Sapiens
GRPCKIVEM

SEQ ID NO: 151208 - protein, 9 aa, Homo Sapiens
GSDMRTERF

SEQ ID NO: 151209 - protein, 9 aa, Homo Sapiens
GTTDHVIVL

SEQ ID NO: 151210 - protein, 9 aa, Homo Sapiens
GVVDHQTEL

SEQ ID NO: 151211 - protein, 9 aa, Homo Sapiens
HAAVRSVLL

SEQ ID NO: 151212 - protein, 9 aa, Homo Sapiens
HDHPHALEF

SEQ ID NO: 151213 - protein, 9 aa, Homo Sapiens
HDYMKQMTF

SEQ ID NO: 151214 - protein, 9 aa, Homo Sapiens
HELIHGSSF

SEQ ID NO: 151215 - protein, 9 aa, Homo Sapiens
HEPEPHILL

SEQ ID NO: 151216 - protein, 9 aa, Homo Sapiens
HGAPGVIYM

SEQ ID NO: 151217 - protein, 9 aa, Homo Sapiens
HLMPHLLTL

SEQ ID NO: 151218 - protein, 9 aa, Homo Sapiens
HLPSGVKSL

SEQ ID NO: 151219 - protein, 9 aa, Homo Sapiens
HLTPVTLEL

SEQ ID NO: 151220 - protein, 9 aa, Homo Sapiens
HMHPAGIIL

SEQ ID NO: 151221 - protein, 9 aa, Homo Sapiens
HRHPDAFYL

SEQ ID NO: 151222 - protein, 9 aa, Homo Sapiens
HRNEVTVEL

SEQ ID NO: 151223 - protein, 9 aa, Homo Sapiens
HRNGGLITL

SEQ ID NO: 151224 - protein, 9 aa, Homo Sapiens
HRPESVVLV

SEQ ID NO: 151225 - protein, 9 aa, Homo Sapiens
HRPLDPLTM

SEQ ID NO: 151226 - protein, 9 aa, Homo Sapiens
HRPSHFLNF

SEQ ID NO: 151227 - protein, 9 aa, Homo Sapiens
HRTDLNPIL

SEQ ID NO: 151228 - protein, 9 aa, Homo Sapiens
HSHPRVVEL

SEQ ID NO: 151229 - protein, 9 aa, Homo Sapiens
HSIGSYFTL

SEQ ID NO: 151230 - protein, 9 aa, Homo Sapiens
HSTPLIVCA

SEQ ID NO: 151231 - protein, 9 aa, Homo Sapiens
HSVAHTVVL

SEQ ID NO: 151232 - protein, 9 aa, Homo Sapiens
HVHEKAILL

SEQ ID NO: 151233 - protein, 9 aa, Homo Sapiens
HVHPNYFSL

SEQ ID NO: 151234 - protein, 9 aa, Homo Sapiens
HVIHHTTVV

SEQ ID NO: 151235 - protein, 9 aa, Homo Sapiens
HVNQYDIVL

SEQ ID NO: 151236 - protein, 9 aa, Homo Sapiens
HVPEHAVVL

SEQ ID NO: 151237 - protein, 9 aa, Homo Sapiens
HVQPRTIYL

SEQ ID NO: 151238 - protein, 9 aa, Homo Sapiens
IAPGVTHEL

SEQ ID NO: 151239 - protein, 9 aa, Homo Sapiens
IAPSHVIEM

SEQ ID NO: 151240 - protein, 9 aa, Homo Sapiens
IDHPHTHVV

SEQ ID NO: 151241 - protein, 9 aa, Homo Sapiens
IDLLRVIHV

SEQ ID NO: 151242 - protein, 9 aa, Homo Sapiens
IEKGHGIRL

SEQ ID NO: 151243 - protein, 9 aa, Homo Sapiens
IINSNPIEL

SEQ ID NO: 151244 - protein, 9 aa, Homo Sapiens
ILMEHIHKL

SEQ ID NO: 151245 - protein, 9 aa, Homo Sapiens
INSSVHVIM

SEQ ID NO: 151246 - protein, 9 aa, Homo Sapiens
IRHPNIITL

SEQ ID NO: 151247 - protein, 9 aa, Homo Sapiens
IRLENEIQT

SEQ ID NO: 151248 - protein, 9 aa, Homo Sapiens
IRMEHVKIV

SEQ ID NO: 151249 - protein, 9 aa, Homo Sapiens
IRMEVGPTM

SEQ ID NO: 151250 - protein, 9 aa, Homo Sapiens
IRNDYYLNL

SEQ ID NO: 151251 - protein, 9 aa, Homo Sapiens
IRPEHVLRL

SEQ ID NO: 151252 - protein, 9 aa, Homo Sapiens
IRPEYAWIV

SEQ ID NO: 151253 - protein, 9 aa, Homo Sapiens
IRPGTAFEL

SEQ ID NO: 151254 - protein, 9 aa, Homo Sapiens
IRSSYIRVL

SEQ ID NO: 151255 - protein, 9 aa, Homo Sapiens
ISNPNSIIL

SEQ ID NO: 151256 - protein, 9 aa, Homo Sapiens
ITQIEHEVS

SEQ ID NO: 151257 - protein, 9 aa, Homo Sapiens
ITVGHETVM

SEQ ID NO: 151258 - protein, 9 aa, Homo Sapiens
IVMEHVVFL

SEQ ID NO: 151259 - protein, 9 aa, Homo Sapiens
IVMPNILVL

SEQ ID NO: 151260 - protein, 9 aa, Homo Sapiens
IVNEYAFLL

SEQ ID NO: 151261 - protein, 9 aa, Homo Sapiens
IVPGNVKSL

SEQ ID NO: 151262 - protein, 9 aa, Homo Sapiens
IYNTTELVM

SEQ ID NO: 151263 - protein, 9 aa, Homo Sapiens
KAMDDTFYL

SEQ ID NO: 151264 - protein, 9 aa, Homo Sapiens
KANHAELIL

SEQ ID NO: 151265 - protein, 9 aa, Homo Sapiens
KANPALYVL

SEQ ID NO: 151266 - protein, 9 aa, Homo Sapiens
KAPEPLSSL

SEQ ID NO: 151267 - protein, 9 aa, Homo Sapiens
KAPGSTSNL

SEQ ID NO: 151268 - protein, 9 aa, Homo Sapiens
KASDLYITL

SEQ ID NO: 151269 - protein, 9 aa, Homo Sapiens
KDFLKIFTF

SEQ ID NO: 151270 - protein, 9 aa, Homo Sapiens
KDIEHALSV

SEQ ID NO: 151271 - protein, 9 aa, Homo Sapiens
KDLIHDVSF

SEQ ID NO: 151272 - protein, 9 aa, Homo Sapiens
KDNERVVGF

SEQ ID NO: 151273 - protein, 9 aa, Homo Sapiens
KEALPKAAF

SEQ ID NO: 151274 - protein, 9 aa, Homo Sapiens
KECMRALGF

SEQ ID NO: 151275 - protein, 9 aa, Homo Sapiens
KELERVTSL

SEQ ID NO: 151276 - protein, 9 aa, Homo Sapiens
KELLRVAQI

SEQ ID NO: 151277 - protein, 9 aa, Homo Sapiens
KEMLPHVGV

SEQ ID NO: 151278 - protein, 9 aa, Homo Sapiens
KEQERIFQL

SEQ ID NO: 151279 - protein, 9 aa, Homo Sapiens
KEQMRIQSL

SEQ ID NO: 151280 - protein, 9 aa, Homo Sapiens
KEVERILGL

SEQ ID NO: 151281 - protein, 9 aa, Homo Sapiens
KGSGVVIIM

SEQ ID NO: 151282 - protein, 9 aa, Homo Sapiens
KINEAFIEM

SEQ ID NO: 151283 - protein, 9 aa, Homo Sapiens
KINELELRL

SEQ ID NO: 151284 - protein, 9 aa, Homo Sapiens
KINMLVIEL

SEQ ID NO: 151285 - protein, 9 aa, Homo Sapiens
KIPAHRVVL

SEQ ID NO: 151286 - protein, 9 aa, Homo Sapiens
KIPNFCVLL

SEQ ID NO: 151287 - protein, 9 aa, Homo Sapiens
KLHEYFPEM

SEQ ID NO: 151288 - protein, 9 aa, Homo Sapiens
KNTDLWIVM

SEQ ID NO: 151289 - protein, 9 aa, Homo Sapiens
KRCDIILVM

SEQ ID NO: 151290 - protein, 9 aa, Homo Sapiens
KRGDVIYIL

SEQ ID NO: 151291 - protein, 9 aa, Homo Sapiens
KRMQHVICV

SEQ ID NO: 151292 - protein, 9 aa, Homo Sapiens
KRQEAIFEL

SEQ ID NO: 151293 - protein, 9 aa, Homo Sapiens
KRQEVIYEL

SEQ ID NO: 151294 - protein, 9 aa, Homo Sapiens
KRVTWIVEF

SEQ ID NO: 151295 - protein, 9 aa, Homo Sapiens
KSIHIVVTM

SEQ ID NO: 151296 - protein, 9 aa, Homo Sapiens
KSNGTIIHV

SEQ ID NO: 151297 - protein, 9 aa, Homo Sapiens
KSTPVTVVL

SEQ ID NO: 151298 - protein, 9 aa, Homo Sapiens
KVPVHVIRM

SEQ ID NO: 151299 - protein, 9 aa, Homo Sapiens
KVSPNELIL

SEQ ID NO: 151300 - protein, 9 aa, Homo Sapiens
KVSPTEIVL

SEQ ID NO: 151301 - protein, 9 aa, Homo Sapiens
KYKDNPFSL

SEQ ID NO: 151302 - protein, 9 aa, Homo Sapiens
LASPVSPEL

SEQ ID NO: 151303 - protein, 9 aa, Homo Sapiens
LKPPHVILV

SEQ ID NO: 151304 - protein, 9 aa, Homo Sapiens
LLPEHFLFL

SEQ ID NO: 151305 - protein, 9 aa, Homo Sapiens
LNMDHTVVL

SEQ ID NO: 151306 - protein, 9 aa, Homo Sapiens
LQIDNARLA

SEQ ID NO: 151307 - protein, 9 aa, Homo Sapiens
LRHPNIVHM

SEQ ID NO: 151308 - protein, 9 aa, Homo Sapiens
LRHPNIVSL

SEQ ID NO: 151309 - protein, 9 aa, Homo Sapiens
LRPPYQISM

SEQ ID NO: 151310 - protein, 9 aa, Homo Sapiens
LRSDSYVEL

SEQ ID NO: 151311 - protein, 9 aa, Homo Sapiens
LSHPLALHL

SEQ ID NO: 151312 - protein, 9 aa, Homo Sapiens
LVHTEVVEL

SEQ ID NO: 151313 - protein, 9 aa, Homo Sapiens
MANGAVIHL

SEQ ID NO: 151314 - protein, 9 aa, Homo Sapiens
MANPTALLL

SEQ ID NO: 151315 - protein, 9 aa, Homo Sapiens
MAPLKMLAL

SEQ ID NO: 151316 - protein, 9 aa, Homo Sapiens
MLAKHVITL

SEQ ID NO: 151317 - protein, 9 aa, Homo Sapiens
MQNPNAIIL

SEQ ID NO: 151318 - protein, 9 aa, Homo Sapiens
MQSGPKPLF

SEQ ID NO: 151319 - protein, 9 aa, Homo Sapiens
MRNKNIVHM

SEQ ID NO: 151320 - protein, 9 aa, Homo Sapiens
MSSSVVVRL

SEQ ID NO: 151321 - protein, 9 aa, Homo Sapiens
NAHGKIIIL

SEQ ID NO: 151322 - protein, 9 aa, Homo Sapiens
NAHNLALVF

SEQ ID NO: 151323 - protein, 9 aa, Homo Sapiens
NAIGVLIYM

SEQ ID NO: 151324 - protein, 9 aa, Homo Sapiens
NATPDSHIM

SEQ ID NO: 151325 - protein, 9 aa, Homo Sapiens
NAYTGIVLL

SEQ ID NO: 151326 - protein, 9 aa, Homo Sapiens
NGHEFVFLL

SEQ ID NO: 151327 - protein, 9 aa, Homo Sapiens
NLPAHTVII

SEQ ID NO: 151328 - protein, 9 aa, Homo Sapiens
NLPPHIIRL

SEQ ID NO: 151329 - protein, 9 aa, Homo Sapiens
NRGVIITML

SEQ ID NO: 151330 - protein, 9 aa, Homo Sapiens
NRHPNFLVV

SEQ ID NO: 151331 - protein, 9 aa, Homo Sapiens
NRSNTVVIM

SEQ ID NO: 151332 - protein, 9 aa, Homo Sapiens
NSHEMAIVF

SEQ ID NO: 151333 - protein, 9 aa, Homo Sapiens
NSTPAVFTM

SEQ ID NO: 151334 - protein, 9 aa, Homo Sapiens
NVADLVVIL

SEQ ID NO: 151335 - protein, 9 aa, Homo Sapiens
NVSNVNLTL

SEQ ID NO: 151336 - protein, 9 aa, Homo Sapiens
NVTWVIVNL

SEQ ID NO: 151337 - protein, 9 aa, Homo Sapiens
PDLPRNAQV

SEQ ID NO: 151338 - protein, 9 aa, Homo Sapiens
QAIENAHVL

SEQ ID NO: 151339 - protein, 9 aa, Homo Sapiens
QDLERVRNL

SEQ ID NO: 151340 - protein, 9 aa, Homo Sapiens
QDVARVLGF

SEQ ID NO: 151341 - protein, 9 aa, Homo Sapiens
QDVKKIEKF

SEQ ID NO: 151342 - protein, 9 aa, Homo Sapiens
QIPEIKQTL

SEQ ID NO: 151343 - protein, 9 aa, Homo Sapiens
QKPNFVIIL

SEQ ID NO: 151344 - protein, 9 aa, Homo Sapiens
QRPTIYYVM

SEQ ID NO: 151345 - protein, 9 aa, Homo Sapiens
QRQPVYIIM

SEQ ID NO: 151346 - protein, 9 aa, Homo Sapiens
QRSRFIVVV

SEQ ID NO: 151347 - protein, 9 aa, Homo Sapiens
RAAIHVVVL

SEQ ID NO: 151348 - protein, 9 aa, Homo Sapiens
RAAPHRISL

SEQ ID NO: 151349 - protein, 9 aa, Homo Sapiens
RAFDHVLHL

SEQ ID NO: 151350 - protein, 9 aa, Homo Sapiens
RAHPQGLVL

SEQ ID NO: 151351 - protein, 9 aa, Homo Sapiens
RALDHYLTL

SEQ ID NO: 151352 - protein, 9 aa, Homo Sapiens
RAMDQKIIL

SEQ ID NO: 151353 - protein, 9 aa, Homo Sapiens
RANTFVAEL

SEQ ID NO: 151354 - protein, 9 aa, Homo Sapiens
RASQFTIVL

SEQ ID NO: 151355 - protein, 9 aa, Homo Sapiens
RDAFRTLGL

SEQ ID NO: 151356 - protein, 9 aa, Homo Sapiens
RDALVHARL

SEQ ID NO: 151357 - protein, 9 aa, Homo Sapiens
RDEIRPLSF

SEQ ID NO: 151358 - protein, 9 aa, Homo Sapiens
RDHAVVVGV

SEQ ID NO: 151359 - protein, 9 aa, Homo Sapiens
RDLERGVEI

SEQ ID NO: 151360 - protein, 9 aa, Homo Sapiens
RDNLKISDF

SEQ ID NO: 151361 - protein, 9 aa, Homo Sapiens
RDSERLLEV

SEQ ID NO: 151362 - protein, 9 aa, Homo Sapiens
RDVQHIIVF

SEQ ID NO: 151363 - protein, 9 aa, Homo Sapiens
RDVQKVVGF

SEQ ID NO: 151364 - protein, 9 aa, Homo Sapiens
RDYEKAIKF

SEQ ID NO: 151365 - protein, 9 aa, Homo Sapiens
REAPERPSL

SEQ ID NO: 151366 - protein, 9 aa, Homo Sapiens
REDVGKVKF

SEQ ID NO: 151367 - protein, 9 aa, Homo Sapiens
REEKRVLGL

SEQ ID NO: 151368 - protein, 9 aa, Homo Sapiens
REFPKFFTF

SEQ ID NO: 151369 - protein, 9 aa, Homo Sapiens
RELQKLSKF

SEQ ID NO: 151370 - protein, 9 aa, Homo Sapiens
RELYHVISF

SEQ ID NO: 151371 - protein, 9 aa, Homo Sapiens
REMLIRVNM

SEQ ID NO: 151372 - protein, 9 aa, Homo Sapiens
REPNVLICF

SEQ ID NO: 151373 - protein, 9 aa, Homo Sapiens
RESERQLRL

SEQ ID NO: 151374 - protein, 9 aa, Homo Sapiens
RESPRPLQL

SEQ ID NO: 151375 - protein, 9 aa, Homo Sapiens
RGSDVIIML

SEQ ID NO: 151376 - protein, 9 aa, Homo Sapiens
RIMEFTTTL

SEQ ID NO: 151377 - protein, 9 aa, Homo Sapiens
RIPSFVTEL

SEQ ID NO: 151378 - protein, 9 aa, Homo Sapiens
RLAEHIVSM

SEQ ID NO: 151379 - protein, 9 aa, Homo Sapiens
RLPAWQPIL

SEQ ID NO: 151380 - protein, 9 aa, Homo Sapiens
RQPPPRPFL

SEQ ID NO: 151381 - protein, 9 aa, Homo Sapiens
RQRSLFVVV

SEQ ID NO: 151382 - protein, 9 aa, Homo Sapiens
RRGDFIHVM

SEQ ID NO: 151383 - protein, 9 aa, Homo Sapiens
RRIQFPIEM

SEQ ID NO: 151384 - protein, 9 aa, Homo Sapiens
RRNDKIIVF

SEQ ID NO: 151385 - protein, 9 aa, Homo Sapiens
RRQEAIYEM

SEQ ID NO: 151386 - protein, 9 aa, Homo Sapiens
RSDPGHYSF

SEQ ID NO: 151387 - protein, 9 aa, Homo Sapiens
RSNPKIWNV

SEQ ID NO: 151388 - protein, 9 aa, Homo Sapiens
RSPNHIVVL

SEQ ID NO: 151389 - protein, 9 aa, Homo Sapiens
RSPPPGMGL

SEQ ID NO: 151390 - protein, 9 aa, Homo Sapiens
RSQEYKIVL

SEQ ID NO: 151391 - protein, 9 aa, Homo Sapiens
RSSPLTVTM

SEQ ID NO: 151392 - protein, 9 aa, Homo Sapiens
RSTDTVFHM

SEQ ID NO: 151393 - protein, 9 aa, Homo Sapiens
RVMEHFIKL

SEQ ID NO: 151394 - protein, 9 aa, Homo Sapiens
RVQSHILHL

SEQ ID NO: 151395 - protein, 9 aa, Homo Sapiens
RVTDAAFNF

SEQ ID NO: 151396 - protein, 9 aa, Homo Sapiens
RVVSHEVVL

SEQ ID NO: 151397 - protein, 9 aa, Homo Sapiens
SAHGVKLVL

SEQ ID NO: 151398 - protein, 9 aa, Homo Sapiens
SAHLFEVEL

SEQ ID NO: 151399 - protein, 9 aa, Homo Sapiens
SAHQDALIL

SEQ ID NO: 151400 - protein, 9 aa, Homo Sapiens
SAHSHFISL

SEQ ID NO: 151401 - protein, 9 aa, Homo Sapiens
SAIDRIFTL

SEQ ID NO: 151402 - protein, 9 aa, Homo Sapiens
SAIPHPLIM

SEQ ID NO: 151403 - protein, 9 aa, Homo Sapiens
SAISEGTVL

SEQ ID NO: 151404 - protein, 9 aa, Homo Sapiens
SALPFITYL

SEQ ID NO: 151405 - protein, 9 aa, Homo Sapiens
SANNVYLVM

SEQ ID NO: 151406 - protein, 9 aa, Homo Sapiens
SAPASQASL

SEQ ID NO: 151407 - protein, 9 aa, Homo Sapiens
SAPSSDKPL

SEQ ID NO: 151408 - protein, 9 aa, Homo Sapiens
SAPVPASPL

SEQ ID NO: 151409 - protein, 9 aa, Homo Sapiens
SASALAVAL

SEQ ID NO: 151410 - protein, 9 aa, Homo Sapiens
SATFAEIFL

SEQ ID NO: 151411 - protein, 9 aa, Homo Sapiens
SATPVAVTA

SEQ ID NO: 151412 - protein, 9 aa, Homo Sapiens
SATRVYIVL

SEQ ID NO: 151413 - protein, 9 aa, Homo Sapiens
SAVGHVFSL

SEQ ID NO: 151414 - protein, 9 aa, Homo Sapiens
SAVSHFFSL

SEQ ID NO: 151415 - protein, 9 aa, Homo Sapiens
SDHIHIIAL

SEQ ID NO: 151416 - protein, 9 aa, Homo Sapiens
SDLERVTSL

SEQ ID NO: 151417 - protein, 9 aa, Homo Sapiens
SDLKRINGF

SEQ ID NO: 151418 - protein, 9 aa, Homo Sapiens
SDLMRMEKI

SEQ ID NO: 151419 - protein, 9 aa, Homo Sapiens
SDLRHLRAV

SEQ ID NO: 151420 - protein, 9 aa, Homo Sapiens
SDLVRCLSV

SEQ ID NO: 151421 - protein, 9 aa, Homo Sapiens
SDSTHLVTL

SEQ ID NO: 151422 - protein, 9 aa, Homo Sapiens
SDYELKYCF

SEQ ID NO: 151423 - protein, 9 aa, Homo Sapiens
SDYIRCIAV

SEQ ID NO: 151424 - protein, 9 aa, Homo Sapiens
SEFQRLLGF

SEQ ID NO: 151425 - protein, 9 aa, Homo Sapiens
SEGPPLTSF

SEQ ID NO: 151426 - protein, 9 aa, Homo Sapiens
SELIRNVTL

SEQ ID NO: 151427 - protein, 9 aa, Homo Sapiens
SELKHWATF

SEQ ID NO: 151428 - protein, 9 aa, Homo Sapiens
SELVRHSSF

SEQ ID NO: 151429 - protein, 9 aa, Homo Sapiens
SEYARPHVM

SEQ ID NO: 151430 - protein, 9 aa, Homo Sapiens
SGAPHAILL

SEQ ID NO: 151431 - protein, 9 aa, Homo Sapiens
SGDVSLLHL

SEQ ID NO: 151432 - protein, 9 aa, Homo Sapiens
SGHTVVLTM

SEQ ID NO: 151433 - protein, 9 aa, Homo Sapiens
SGPGPAAAL

SEQ ID NO: 151434 - protein, 9 aa, Homo Sapiens
SGQAFELIL

SEQ ID NO: 151435 - protein, 9 aa, Homo Sapiens
SINDKIIEL

SEQ ID NO: 151436 - protein, 9 aa, Homo Sapiens
SIPDFPMHL

SEQ ID NO: 151437 - protein, 9 aa, Homo Sapiens
SIPEFFHIM

SEQ ID NO: 151438 - protein, 9 aa, Homo Sapiens
SISHYVIVM

SEQ ID NO: 151439 - protein, 9 aa, Homo Sapiens
SKPNHTLVL

SEQ ID NO: 151440 - protein, 9 aa, Homo Sapiens
SLMSHAIEL

SEQ ID NO: 151441 - protein, 9 aa, Homo Sapiens
SLPHNIIEL

SEQ ID NO: 151442 - protein, 9 aa, Homo Sapiens
SLSTVFVVL

SEQ ID NO: 151443 - protein, 9 aa, Homo Sapiens
SLTPVTLVL

SEQ ID NO: 151444 - protein, 9 aa, Homo Sapiens
SNTYVMVVM

SEQ ID NO: 151445 - protein, 9 aa, Homo Sapiens
SRGDVKVIM

SEQ ID NO: 151446 - protein, 9 aa, Homo Sapiens
SRITTHFEL

SEQ ID NO: 151447 - protein, 9 aa, Homo Sapiens
SRMLHFLTA

SEQ ID NO: 151448 - protein, 9 aa, Homo Sapiens
SRMVHAIKM

SEQ ID NO: 151449 - protein, 9 aa, Homo Sapiens
SRPALPFIL

SEQ ID NO: 151450 - protein, 9 aa, Homo Sapiens
SRPNIILVM

SEQ ID NO: 151451 - protein, 9 aa, Homo Sapiens
SRPSHYHVL

SEQ ID NO: 151452 - protein, 9 aa, Homo Sapiens
SRQGCTITM

SEQ ID NO: 151453 - protein, 9 aa, Homo Sapiens
SRSHAIFTI

SEQ ID NO: 151454 - protein, 9 aa, Homo Sapiens
SRSHSIFTV

SEQ ID NO: 151455 - protein, 9 aa, Homo Sapiens
SSHELFITL

SEQ ID NO: 151456 - protein, 9 aa, Homo Sapiens
SSHNSSFEL

SEQ ID NO: 151457 - protein, 9 aa, Homo Sapiens
SSHTFVPIL

SEQ ID NO: 151458 - protein, 9 aa, Homo Sapiens
SSLLEKGLD

SEQ ID NO: 151459 - protein, 9 aa, Homo Sapiens
SSNPVYMEM

SEQ ID NO: 151460 - protein, 9 aa, Homo Sapiens
SSNVVQLIM

SEQ ID NO: 151461 - protein, 9 aa, Homo Sapiens
SSSAFRPVM

SEQ ID NO: 151462 - protein, 9 aa, Homo Sapiens
SSSPVNILL

SEQ ID NO: 151463 - protein, 9 aa, Homo Sapiens
SSSPVSVVL

SEQ ID NO: 151464 - protein, 9 aa, Homo Sapiens
STPDHSFSL

SEQ ID NO: 151465 - protein, 9 aa, Homo Sapiens
SVHEKIFTL

SEQ ID NO: 151466 - protein, 9 aa, Homo Sapiens
SVIGFRILL

SEQ ID NO: 151467 - protein, 9 aa, Homo Sapiens
SVIPHILKM

SEQ ID NO: 151468 - protein, 9 aa, Homo Sapiens
SVNPYIVKL

SEQ ID NO: 151469 - protein, 9 aa, Homo Sapiens
SVPDTAFSL

SEQ ID NO: 151470 - protein, 9 aa, Homo Sapiens
SVVQHLIHL

SEQ ID NO: 151471 - protein, 9 aa, Homo Sapiens
SYKDSTLIM

SEQ ID NO: 151472 - protein, 9 aa, Homo Sapiens
TAPQGNVDL

SEQ ID NO: 151473 - protein, 9 aa, Homo Sapiens
TASPVAVSL

SEQ ID NO: 151474 - protein, 9 aa, Homo Sapiens
TDAPHFYGL

SEQ ID NO: 151475 - protein, 9 aa, Homo Sapiens
TDFIKIEEF

SEQ ID NO: 151476 - protein, 9 aa, Homo Sapiens
TDLTRKEGL

SEQ ID NO: 151477 - protein, 9 aa, Homo Sapiens
TDSPREVFF

SEQ ID NO: 151478 - protein, 9 aa, Homo Sapiens
TELERKLTF

SEQ ID NO: 151479 - protein, 9 aa, Homo Sapiens
TGNPTVIKM

SEQ ID NO: 151480 - protein, 9 aa, Homo Sapiens
TIMEKSLVL

SEQ ID NO: 151481 - protein, 9 aa, Homo Sapiens
TISSNVASK

SEQ ID NO: 151482 - protein, 9 aa, Homo Sapiens
TLPWHSLIL

SEQ ID NO: 151483 - protein, 9 aa, Homo Sapiens
TNSPTVIVM

SEQ ID NO: 151484 - protein, 9 aa, Homo Sapiens
TRHPENWTL

SEQ ID NO: 151485 - protein, 9 aa, Homo Sapiens
TRPEKALIL

SEQ ID NO: 151486 - protein, 9 aa, Homo Sapiens
TSAAHQVVL

SEQ ID NO: 151487 - protein, 9 aa, Homo Sapiens
TSHPYRLIL

SEQ ID NO: 151488 - protein, 9 aa, Homo Sapiens
TSIGHVVQL

SEQ ID NO: 151489 - protein, 9 aa, Homo Sapiens
TSSAHYIIL

SEQ ID NO: 151490 - protein, 9 aa, Homo Sapiens
TVILHSIYL

SEQ ID NO: 151491 - protein, 9 aa, Homo Sapiens
TVNGMTITM

SEQ ID NO: 151492 - protein, 9 aa, Homo Sapiens
TVNRTVITM

SEQ ID NO: 151493 - protein, 9 aa, Homo Sapiens
TYMPHVHIL

SEQ ID NO: 151494 - protein, 9 aa, Homo Sapiens
VAAAHSVVL

SEQ ID NO: 151495 - protein, 9 aa, Homo Sapiens
VAMDSIIHM

SEQ ID NO: 151496 - protein, 9 aa, Homo Sapiens
VAMTGEITL

SEQ ID NO: 151497 - protein, 9 aa, Homo Sapiens
VANPEHMEM

SEQ ID NO: 151498 - protein, 9 aa, Homo Sapiens
VAPPGCSHL

SEQ ID NO: 151499 - protein, 9 aa, Homo Sapiens
VASEYPVIL

SEQ ID NO: 151500 - protein, 9 aa, Homo Sapiens
VDHEKIYRM

SEQ ID NO: 151501 - protein, 9 aa, Homo Sapiens
VDHEKPLSF

SEQ ID NO: 151502 - protein, 9 aa, Homo Sapiens
VDLERTIAL

SEQ ID NO: 151503 - protein, 9 aa, Homo Sapiens
VELPHINLL

SEQ ID NO: 151504 - protein, 9 aa, Homo Sapiens
VGGEALELR

SEQ ID NO: 151505 - protein, 9 aa, Homo Sapiens
VGHPFVIQL

SEQ ID NO: 151506 - protein, 9 aa, Homo Sapiens
VINPEPITL

SEQ ID NO: 151507 - protein, 9 aa, Homo Sapiens
VIPESVILL

SEQ ID NO: 151508 - protein, 9 aa, Homo Sapiens
VIPGHLIFL

SEQ ID NO: 151509 - protein, 9 aa, Homo Sapiens
VIQEAFIEL

SEQ ID NO: 151510 - protein, 9 aa, Homo Sapiens
VITGVDIVM

SEQ ID NO: 151511 - protein, 9 aa, Homo Sapiens
VLMDHILNL

SEQ ID NO: 151512 - protein, 9 aa, Homo Sapiens
VNNPHFLIM

SEQ ID NO: 151513 - protein, 9 aa, Homo Sapiens
VQPTHVIHL

SEQ ID NO: 151514 - protein, 9 aa, Homo Sapiens
VRMENVTVL

SEQ ID NO: 151515 - protein, 9 aa, Homo Sapiens
VRNEHFWTL

SEQ ID NO: 151516 - protein, 9 aa, Homo Sapiens
VRNNVIIVM

SEQ ID NO: 151517 - protein, 9 aa, Homo Sapiens
VRNPFTVTV

SEQ ID NO: 151518 - protein, 9 aa, Homo Sapiens
VRNPRITSL

SEQ ID NO: 151519 - protein, 9 aa, Homo Sapiens
VRPSYWLVL

SEQ ID NO: 151520 - protein, 9 aa, Homo Sapiens
VRPTNVLEM

SEQ ID NO: 151521 - protein, 9 aa, Homo Sapiens
VRSPVVHSV

SEQ ID NO: 151522 - protein, 9 aa, Homo Sapiens
VSHDSTVCL

SEQ ID NO: 151523 - protein, 9 aa, Homo Sapiens
VSTWLAIIL

SEQ ID NO: 151524 - protein, 9 aa, Homo Sapiens
VTIKKDVDG

SEQ ID NO: 151525 - protein, 9 aa, Homo Sapiens
VTIPTAHVM

SEQ ID NO: 151526 - protein, 9 aa, Homo Sapiens
VTMPCTWVM

SEQ ID NO: 151527 - protein, 9 aa, Homo Sapiens
VVADHGLTL

SEQ ID NO: 151528 - protein, 9 aa, Homo Sapiens
VVAPHTLKL

SEQ ID NO: 151529 - protein, 9 aa, Homo Sapiens
VVMNVVHQL

SEQ ID NO: 151530 - protein, 9 aa, Homo Sapiens
VVPDHPVLL

SEQ ID NO: 151531 - protein, 9 aa, Homo Sapiens
VYNENLVHM

SEQ ID NO: 151532 - protein, 9 aa, Homo Sapiens
WLPNHVVFL

SEQ ID NO: 151533 - protein, 9 aa, Homo Sapiens
YAAPHFFHL

SEQ ID NO: 151534 - protein, 9 aa, Homo Sapiens
YAHILAVLL

SEQ ID NO: 151535 - protein, 9 aa, Homo Sapiens
YAIESQLQL

SEQ ID NO: 151536 - protein, 9 aa, Homo Sapiens
YAIEVDPVL

SEQ ID NO: 151537 - protein, 9 aa, Homo Sapiens
YANFNRIIL

SEQ ID NO: 151538 - protein, 9 aa, Homo Sapiens
YATDLVVCV

SEQ ID NO: 151539 - protein, 9 aa, Homo Sapiens
YDLLRNTNF

SEQ ID NO: 151540 - protein, 9 aa, Homo Sapiens
YGIEHALAL

SEQ ID NO: 151541 - protein, 9 aa, Homo Sapiens
YGIENEVFL

SEQ ID NO: 151542 - protein, 9 aa, Homo Sapiens
YGNPNTLRL

SEQ ID NO: 151543 - protein, 9 aa, Homo Sapiens
YGSPNALVL

SEQ ID NO: 151544 - protein, 9 aa, Homo Sapiens
YGYEHILTL

SEQ ID NO: 151545 - protein, 9 aa, Homo Sapiens
YIPNKVLIL

SEQ ID NO: 151546 - protein, 9 aa, Homo Sapiens
YIVDHTIIM

SEQ ID NO: 151547 - protein, 9 aa, Homo Sapiens
YKNGWIVMI

SEQ ID NO: 151548 - protein, 9 aa, Homo Sapiens
YLPQHTIET

SEQ ID NO: 151549 - protein, 9 aa, Homo Sapiens
YMIAHITGL

SEQ ID NO: 151550 - protein, 9 aa, Homo Sapiens
YMIDNVILL

SEQ ID NO: 151551 - protein, 9 aa, Homo Sapiens
YMLEHVITL

SEQ ID NO: 151552 - protein, 9 aa, Homo Sapiens
YNQGFEIVL

SEQ ID NO: 151553 - protein, 9 aa, Homo Sapiens
YRHPDPREL

SEQ ID NO: 151554 - protein, 9 aa, Homo Sapiens
YRNAYTMVL

SEQ ID NO: 151555 - protein, 9 aa, Homo Sapiens
YRNPVSQCM

SEQ ID NO: 151556 - protein, 9 aa, Homo Sapiens
YRPAYLVTL

SEQ ID NO: 151557 - protein, 9 aa, Homo Sapiens
YRPLYPFSL

SEQ ID NO: 151558 - protein, 9 aa, Homo Sapiens
YRPNETFHL

SEQ ID NO: 151559 - protein, 9 aa, Homo Sapiens
YRQKQVVIL

SEQ ID NO: 151560 - protein, 9 aa, Homo Sapiens
YRTDMIQAL

SEQ ID NO: 151561 - protein, 9 aa, Homo Sapiens
YRTPTTHTM

SEQ ID NO: 151562 - protein, 9 aa, Homo Sapiens
YSAPVIHVL

SEQ ID NO: 151563 - protein, 9 aa, Homo Sapiens
YSDDIPHAL

SEQ ID NO: 151564 - protein, 9 aa, Homo Sapiens
YSHPGVVFL

SEQ ID NO: 151565 - protein, 9 aa, Homo Sapiens
YSSPFDPVL

SEQ ID NO: 151566 - protein, 9 aa, Homo Sapiens
YSTPHAFTF

SEQ ID NO: 151567 - protein, 9 aa, Homo Sapiens
YTNGKCVIL

SEQ ID NO: 151568 - protein, 9 aa, Homo Sapiens
YTNPSGIVL

SEQ ID NO: 151569 - protein, 9 aa, Homo Sapiens
YTSNIPIIL

SEQ ID NO: 151570 - protein, 9 aa, Homo Sapiens
YVAPKAVWL

SEQ ID NO: 151571 - protein, 9 aa, Homo Sapiens
YVAVTPFSL

SEQ ID NO: 151572 - protein, 9 aa, Homo Sapiens
YVHELSLEM

SEQ ID NO: 151573 - protein, 9 aa, Homo Sapiens
YVHPFIFAL

SEQ ID NO: 151574 - protein, 9 aa, Homo Sapiens
YVIEDDVNM

SEQ ID NO: 151575 - protein, 9 aa, Homo Sapiens
YVINVTTHL

SEQ ID NO: 151576 - protein, 9 aa, Homo Sapiens
YVVPYTIHL

SEQ ID NO: 151577 - protein, 9 aa, Homo Sapiens
YYFVFDHAL

SEQ ID NO: 151578 - protein, 9 aa, Homo Sapiens
YYKPGLLMM

SEQ ID NO: 151579 - protein, 9 aa, Homo Sapiens
YYSPHGHIL

SEQ ID NO: 151580 - protein, 9 aa, Homo Sapiens
YYTDFLITL

SEQ ID NO: 151581 - protein, 10 aa, Homo Sapiens
AELEDLRQRL

SEQ ID NO: 151582 - protein, 10 aa, Homo Sapiens
ARANPFNTPH

SEQ ID NO: 151583 - protein, 10 aa, Homo Sapiens
EEQLQQIRAE

SEQ ID NO: 151584 - protein, 10 aa, Homo Sapiens
FRNPDTIFIL

SEQ ID NO: 151585 - protein, 10 aa, Homo Sapiens
GPPPPPGKPQ

SEQ ID NO: 151586 - protein, 10 aa, Homo Sapiens
IRLENEIQTY

SEQ ID NO: 151587 - protein, 10 aa, Homo Sapiens
LRIEPFTTYF

SEQ ID NO: 151588 - protein, 10 aa, Homo Sapiens
NRQDPFTVHM

SEQ ID NO: 151589 - protein, 10 aa, Homo Sapiens
RNVSTGDVNV

SEQ ID NO: 151590 - protein, 10 aa, Homo Sapiens
SIVGERGRLD

SEQ ID NO: 151591 - protein, 10 aa, Homo Sapiens
SYAGSIPLLI

SEQ ID NO: 151592 - protein, 10 aa, Homo Sapiens
TDGPNERIGM

SEQ ID NO: 151593 - protein, 10 aa, Homo Sapiens
TEKDSYVVAF

SEQ ID NO: 151594 - protein, 10 aa, Homo Sapiens
TISSNVASKA

SEQ ID NO: 151595 - protein, 10 aa, Homo Sapiens
VRPEQPFIVL

SEQ ID NO: 151596 - protein, 10 aa, Homo Sapiens
YAHPLETLIL

SEQ ID NO: 151597 - protein, 10 aa, Homo Sapiens
YGPPGTGKTL

SEQ ID NO: 151598 - protein, 10 aa, Homo Sapiens
YNIVDDHLVV

SEQ ID NO: 151599 - protein, 10 aa, Homo Sapiens
YRKGPPFYHA

SEQ ID NO: 151600 - protein, 10 aa, Homo Sapiens
YTGGSLIPLL

SEQ ID NO: 151601 - protein, 10 aa, Homo Sapiens
YVPPKGDKKG

SEQ ID NO: 151602 - protein, 11 aa, Homo Sapiens
AEQRGELAIKD

SEQ ID NO: 151603 - protein, 11 aa, Homo Sapiens
EGNCPERIITL

SEQ ID NO: 151604 - protein, 11 aa, Homo Sapiens
ESVGKGAVHDV

SEQ ID NO: 151605 - protein, 11 aa, Homo Sapiens
FAYDGKDYLTL

SEQ ID NO: 151606 - protein, 11 aa, Homo Sapiens
GVAGPKGPAGE

SEQ ID NO: 151607 - protein, 11 aa, Homo Sapiens
IDNNIEQISSY

SEQ ID NO: 151608 - protein, 11 aa, Homo Sapiens
ITQIEHEVSSS

SEQ ID NO: 151609 - protein, 11 aa, Homo Sapiens
LASDFEIGHFF

SEQ ID NO: 151610 - protein, 11 aa, Homo Sapiens
REHERLLKHKL

SEQ ID NO: 151611 - protein, 11 aa, Homo Sapiens
SSTISSNVASK

SEQ ID NO: 151612 - protein, 11 aa, Homo Sapiens
TEELNREVATN

SEQ ID NO: 151613 - protein, 11 aa, Homo Sapiens
VAPGKDLTKTL

SEQ ID NO: 151614 - protein, 11 aa, Homo Sapiens
VATTPLGPEHM

SEQ ID NO: 151615 - protein, 11 aa, Homo Sapiens
YQSKYEELQIT

SEQ ID NO: 151616 - protein, 8 aa, Homo Sapiens
AAAPPLTL

SEQ ID NO: 151617 - protein, 8 aa, Homo Sapiens
AAAWPLLL

SEQ ID NO: 151618 - protein, 8 aa, Homo Sapiens
AAPTSSAL

SEQ ID NO: 151619 - protein, 8 aa, Homo Sapiens
AASALPAL

SEQ ID NO: 151620 - protein, 8 aa, Homo Sapiens
AASHPLLL

SEQ ID NO: 151621 - protein, 8 aa, Homo Sapiens
AHSFFDEL

SEQ ID NO: 151622 - protein, 8 aa, Homo Sapiens
APRPAPVA

SEQ ID NO: 151623 - protein, 8 aa, Homo Sapiens
ASHVSPEV

SEQ ID NO: 151624 - protein, 8 aa, Homo Sapiens
ATAEPLCL

SEQ ID NO: 151625 - protein, 8 aa, Homo Sapiens
CAHTNVEL

SEQ ID NO: 151626 - protein, 8 aa, Homo Sapiens
CSSVHPSV

SEQ ID NO: 151627 - protein, 8 aa, Homo Sapiens
CTFVIEAL

SEQ ID NO: 151628 - protein, 8 aa, Homo Sapiens
DGIFKAEL

SEQ ID NO: 151629 - protein, 8 aa, Homo Sapiens
EAQPDLSI

SEQ ID NO: 151630 - protein, 8 aa, Homo Sapiens
FAARPVLL

SEQ ID NO: 151631 - protein, 8 aa, Homo Sapiens
FADAVQEL

SEQ ID NO: 151632 - protein, 8 aa, Homo Sapiens
FAFSSQEL

SEQ ID NO: 151633 - protein, 8 aa, Homo Sapiens
FAGLVQEI

SEQ ID NO: 151634 - protein, 8 aa, Homo Sapiens
FAGMPITL

SEQ ID NO: 151635 - protein, 8 aa, Homo Sapiens
FAGQPLTI

SEQ ID NO: 151636 - protein, 8 aa, Homo Sapiens
FAHGLGEL

SEQ ID NO: 151637 - protein, 8 aa, Homo Sapiens
FAHGNAEL

SEQ ID NO: 151638 - protein, 8 aa, Homo Sapiens
FAHHGRSL

SEQ ID NO: 151639 - protein, 8 aa, Homo Sapiens
FAHSFIEL

SEQ ID NO: 151640 - protein, 8 aa, Homo Sapiens
FALNHPEL

SEQ ID NO: 151641 - protein, 8 aa, Homo Sapiens
FASGAVEL

SEQ ID NO: 151642 - protein, 8 aa, Homo Sapiens
FITDPVVL

SEQ ID NO: 151643 - protein, 8 aa, Homo Sapiens
FLDKALEL

SEQ ID NO: 151644 - protein, 8 aa, Homo Sapiens
FNHINVEL

SEQ ID NO: 151645 - protein, 8 aa, Homo Sapiens
FSFVMPSL

SEQ ID NO: 151646 - protein, 8 aa, Homo Sapiens
FTADPLSL

SEQ ID NO: 151647 - protein, 8 aa, Homo Sapiens
FVNVQKEL

SEQ ID NO: 151648 - protein, 8 aa, Homo Sapiens
FWKEHPEI

SEQ ID NO: 151649 - protein, 8 aa, Homo Sapiens
FYQEHPDL

SEQ ID NO: 151650 - protein, 8 aa, Homo Sapiens
HAAEALLL

SEQ ID NO: 151651 - protein, 8 aa, Homo Sapiens
HPFYTRAA

SEQ ID NO: 151652 - protein, 8 aa, Homo Sapiens
HPTSIVKA

SEQ ID NO: 151653 - protein, 8 aa, Homo Sapiens
HTGPITCL

SEQ ID NO: 151654 - protein, 8 aa, Homo Sapiens
IAGPVVEI

SEQ ID NO: 151655 - protein, 8 aa, Homo Sapiens
ISHESPAV

SEQ ID NO: 151656 - protein, 8 aa, Homo Sapiens
ISHYHETL

SEQ ID NO: 151657 - protein, 8 aa, Homo Sapiens
ISQEHQEL

SEQ ID NO: 151658 - protein, 8 aa, Homo Sapiens
IVGPVVGL

SEQ ID NO: 151659 - protein, 8 aa, Homo Sapiens
KAHLGTAL

SEQ ID NO: 151660 - protein, 8 aa, Homo Sapiens
KSHFIVAL

SEQ ID NO: 151661 - protein, 8 aa, Homo Sapiens
KSQVHPVL

SEQ ID NO: 151662 - protein, 8 aa, Homo Sapiens
LAFVSPSL

SEQ ID NO: 151663 - protein, 8 aa, Homo Sapiens
LAGPALEL

SEQ ID NO: 151664 - protein, 8 aa, Homo Sapiens
LAGPPLEI

SEQ ID NO: 151665 - protein, 8 aa, Homo Sapiens
LAGPVLGL

SEQ ID NO: 151666 - protein, 8 aa, Homo Sapiens
LAGPVQEV

SEQ ID NO: 151667 - protein, 8 aa, Homo Sapiens
LAHEIEAL

SEQ ID NO: 151668 - protein, 8 aa, Homo Sapiens
LAHVGPRL

SEQ ID NO: 151669 - protein, 8 aa, Homo Sapiens
LIGPPLLI

SEQ ID NO: 151670 - protein, 8 aa, Homo Sapiens
LQGPILRL

SEQ ID NO: 151671 - protein, 8 aa, Homo Sapiens
LTAEILEL

SEQ ID NO: 151672 - protein, 8 aa, Homo Sapiens
LTAEVLEL

SEQ ID NO: 151673 - protein, 8 aa, Homo Sapiens
LTGPVLEL

SEQ ID NO: 151674 - protein, 8 aa, Homo Sapiens
MAGPRLEI

SEQ ID NO: 151675 - protein, 8 aa, Homo Sapiens
MPQPVPTA

SEQ ID NO: 151676 - protein, 8 aa, Homo Sapiens
MSQVAPSL

SEQ ID NO: 151677 - protein, 8 aa, Homo Sapiens
NAASPLIV

SEQ ID NO: 151678 - protein, 8 aa, Homo Sapiens
NAGPAIVI

SEQ ID NO: 151679 - protein, 8 aa, Homo Sapiens
NAHIQNEL

SEQ ID NO: 151680 - protein, 8 aa, Homo Sapiens
NSFTHEAL

SEQ ID NO: 151681 - protein, 8 aa, Homo Sapiens
PDQPHPEI

SEQ ID NO: 151682 - protein, 8 aa, Homo Sapiens
QAADVLEL

SEQ ID NO: 151683 - protein, 8 aa, Homo Sapiens
QAAPPIEL

SEQ ID NO: 151684 - protein, 8 aa, Homo Sapiens
RAAPGAEF

SEQ ID NO: 151685 - protein, 8 aa, Homo Sapiens
SAAPAIQL

SEQ ID NO: 151686 - protein, 8 aa, Homo Sapiens
SAHTHVEL

SEQ ID NO: 151687 - protein, 8 aa, Homo Sapiens
SDDIPHAL

SEQ ID NO: 151688 - protein, 8 aa, Homo Sapiens
SPVPVPRA

SEQ ID NO: 151689 - protein, 8 aa, Homo Sapiens
SWFTHPSL

SEQ ID NO: 151690 - protein, 8 aa, Homo Sapiens
TAQNHPML

SEQ ID NO: 151691 - protein, 8 aa, Homo Sapiens
TASEPLTL

SEQ ID NO: 151692 - protein, 8 aa, Homo Sapiens
TDHNLHEL

SEQ ID NO: 151693 - protein, 8 aa, Homo Sapiens
TFLNHPAL

SEQ ID NO: 151694 - protein, 8 aa, Homo Sapiens
TQHLHPSL

SEQ ID NO: 151695 - protein, 8 aa, Homo Sapiens
TTHLSPEL

SEQ ID NO: 151696 - protein, 8 aa, Homo Sapiens
VAAEILEI

SEQ ID NO: 151697 - protein, 8 aa, Homo Sapiens
VAAPILCL

SEQ ID NO: 151698 - protein, 8 aa, Homo Sapiens
VAGPEMQV

SEQ ID NO: 151699 - protein, 8 aa, Homo Sapiens
VAGPSVTL

SEQ ID NO: 151700 - protein, 8 aa, Homo Sapiens
VALDCEIP

SEQ ID NO: 151701 - protein, 8 aa, Homo Sapiens
VATTALEL

SEQ ID NO: 151702 - protein, 8 aa, Homo Sapiens
VAYEAPSL

SEQ ID NO: 151703 - protein, 8 aa, Homo Sapiens
VFFCHGEL

SEQ ID NO: 151704 - protein, 8 aa, Homo Sapiens
VIGPPVVL

SEQ ID NO: 151705 - protein, 8 aa, Homo Sapiens
VPTNIIAA

SEQ ID NO: 151706 - protein, 8 aa, Homo Sapiens
VSGPAMTL

SEQ ID NO: 151707 - protein, 8 aa, Homo Sapiens
VSQVGKEL

SEQ ID NO: 151708 - protein, 8 aa, Homo Sapiens
VTEQGHEL

SEQ ID NO: 151709 - protein, 8 aa, Homo Sapiens
VVAEPVEL

SEQ ID NO: 151710 - protein, 8 aa, Homo Sapiens
VWYESPSL

SEQ ID NO: 151711 - protein, 8 aa, Homo Sapiens
YAAAAEVL

SEQ ID NO: 151712 - protein, 8 aa, Homo Sapiens
YAAQPELL

SEQ ID NO: 151713 - protein, 8 aa, Homo Sapiens
YAGAILEV

SEQ ID NO: 151714 - protein, 8 aa, Homo Sapiens
YGFVNHAL

SEQ ID NO: 151715 - protein, 8 aa, Homo Sapiens
YSLDMWRL

SEQ ID NO: 151716 - protein, 8 aa, Homo Sapiens
YSYVTEEL

SEQ ID NO: 151717 - protein, 8 aa, Homo Sapiens
YTAEPVTL

SEQ ID NO: 151718 - protein, 8 aa, Homo Sapiens
YVSFPLEL

SEQ ID NO: 151719 - protein, 8 aa, Homo Sapiens
YWQNHPEL

SEQ ID NO: 151720 - protein, 9 aa, Homo Sapiens
AAAAANPTL

SEQ ID NO: 151721 - protein, 9 aa, Homo Sapiens
AAAAATMAL

SEQ ID NO: 151722 - protein, 9 aa, Homo Sapiens
AAAALHPAL

SEQ ID NO: 151723 - protein, 9 aa, Homo Sapiens
AAAAPRAVA

SEQ ID NO: 151724 - protein, 9 aa, Homo Sapiens
AAAAPSPVL

SEQ ID NO: 151725 - protein, 9 aa, Homo Sapiens
AAAAPSPVM

SEQ ID NO: 151726 - protein, 9 aa, Homo Sapiens
AAAAVGPAM

SEQ ID NO: 151727 - protein, 9 aa, Homo Sapiens
AAADASPSL

SEQ ID NO: 151728 - protein, 9 aa, Homo Sapiens
AAADITSSL

SEQ ID NO: 151729 - protein, 9 aa, Homo Sapiens
AAADVLEAL

SEQ ID NO: 151730 - protein, 9 aa, Homo Sapiens
AAAGDHVSL

SEQ ID NO: 151731 - protein, 9 aa, Homo Sapiens
AAAGGHEPL

SEQ ID NO: 151732 - protein, 9 aa, Homo Sapiens
AAAGPGEVL

SEQ ID NO: 151733 - protein, 9 aa, Homo Sapiens
AAAHFYFEL

SEQ ID NO: 151734 - protein, 9 aa, Homo Sapiens
AAAKCLLEL

SEQ ID NO: 151735 - protein, 9 aa, Homo Sapiens
AAAKTFEQL

SEQ ID NO: 151736 - protein, 9 aa, Homo Sapiens
AAAPAGTTF

SEQ ID NO: 151737 - protein, 9 aa, Homo Sapiens
AAAPASGAL

SEQ ID NO: 151738 - protein, 9 aa, Homo Sapiens
AAAPASGEM

SEQ ID NO: 151739 - protein, 9 aa, Homo Sapiens
AAAPHLLLL

SEQ ID NO: 151740 - protein, 9 aa, Homo Sapiens
AAAPPAKEI

SEQ ID NO: 151741 - protein, 9 aa, Homo Sapiens
AAAPPAPAA

SEQ ID NO: 151742 - protein, 9 aa, Homo Sapiens
AAAPQLLIV

SEQ ID NO: 151743 - protein, 9 aa, Homo Sapiens
AAAPSLLIL

SEQ ID NO: 151744 - protein, 9 aa, Homo Sapiens
AAAPVLTPA

SEQ ID NO: 151745 - protein, 9 aa, Homo Sapiens
AAAQPQPSV

SEQ ID NO: 151746 - protein, 9 aa, Homo Sapiens
AAASAFTSL

SEQ ID NO: 151747 - protein, 9 aa, Homo Sapiens
AAASHFFNL

SEQ ID NO: 151748 - protein, 9 aa, Homo Sapiens
AAATDFESL

SEQ ID NO: 151749 - protein, 9 aa, Homo Sapiens
AAAYPHTSL

SEQ ID NO: 151750 - protein, 9 aa, Homo Sapiens
AACDILSQL

SEQ ID NO: 151751 - protein, 9 aa, Homo Sapiens
AACDLLQSL

SEQ ID NO: 151752 - protein, 9 aa, Homo Sapiens
AACELLHSM

SEQ ID NO: 151753 - protein, 9 aa, Homo Sapiens
AACETFLKL

SEQ ID NO: 151754 - protein, 9 aa, Homo Sapiens
AACGGHVEL

SEQ ID NO: 151755 - protein, 9 aa, Homo Sapiens
AACNIYSTL

SEQ ID NO: 151756 - protein, 9 aa, Homo Sapiens
AACRVIARL

SEQ ID NO: 151757 - protein, 9 aa, Homo Sapiens
AACSAFATL

SEQ ID NO: 151758 - protein, 9 aa, Homo Sapiens
AADAKPESL

SEQ ID NO: 151759 - protein, 9 aa, Homo Sapiens
AADDIHRSL

SEQ ID NO: 151760 - protein, 9 aa, Homo Sapiens
AADDSKLVL

SEQ ID NO: 151761 - protein, 9 aa, Homo Sapiens
AADDSSVKL

SEQ ID NO: 151762 - protein, 9 aa, Homo Sapiens
AADEITHCI

SEQ ID NO: 151763 - protein, 9 aa, Homo Sapiens
AADETAVQL

SEQ ID NO: 151764 - protein, 9 aa, Homo Sapiens
AADEVLAVL

SEQ ID NO: 151765 - protein, 9 aa, Homo Sapiens
AADFAQMEL

SEQ ID NO: 151766 - protein, 9 aa, Homo Sapiens
AADGKGVVV

SEQ ID NO: 151767 - protein, 9 aa, Homo Sapiens
AADGKLLKL

SEQ ID NO: 151768 - protein, 9 aa, Homo Sapiens
AADGQLHTL

SEQ ID NO: 151769 - protein, 9 aa, Homo Sapiens
AADHTVYKL

SEQ ID NO: 151770 - protein, 9 aa, Homo Sapiens
AADKGVYII

SEQ ID NO: 151771 - protein, 9 aa, Homo Sapiens
AADLGSPSL

SEQ ID NO: 151772 - protein, 9 aa, Homo Sapiens
AADPEAPEI

SEQ ID NO: 151773 - protein, 9 aa, Homo Sapiens
AADPGLHET

SEQ ID NO: 151774 - protein, 9 aa, Homo Sapiens
AADPSVVNL

SEQ ID NO: 151775 - protein, 9 aa, Homo Sapiens
AADPVSPLL

SEQ ID NO: 151776 - protein, 9 aa, Homo Sapiens
AADRCGAAL

SEQ ID NO: 151777 - protein, 9 aa, Homo Sapiens
AADRPGVSL

SEQ ID NO: 151778 - protein, 9 aa, Homo Sapiens
AADSSPSEL

SEQ ID NO: 151779 - protein, 9 aa, Homo Sapiens
AADWHNLIL

SEQ ID NO: 151780 - protein, 9 aa, Homo Sapiens
AADYSQLEL

SEQ ID NO: 151781 - protein, 9 aa, Homo Sapiens
AAEEANAVL

SEQ ID NO: 151782 - protein, 9 aa, Homo Sapiens
AAEEGLREL

SEQ ID NO: 151783 - protein, 9 aa, Homo Sapiens
AAEQSFAEL

SEQ ID NO: 151784 - protein, 9 aa, Homo Sapiens
AAEYGAEAL

SEQ ID NO: 151785 - protein, 9 aa, Homo Sapiens
AAFFAADEL

SEQ ID NO: 151786 - protein, 9 aa, Homo Sapiens
AAFFARDEL

SEQ ID NO: 151787 - protein, 9 aa, Homo Sapiens
AAFGRDLFL

SEQ ID NO: 151788 - protein, 9 aa, Homo Sapiens
AAFHQIEAV

SEQ ID NO: 151789 - protein, 9 aa, Homo Sapiens
AAGPPLVAA

SEQ ID NO: 151790 - protein, 9 aa, Homo Sapiens
AAGPVGMAA

SEQ ID NO: 151791 - protein, 9 aa, Homo Sapiens
AAGPVGPAL

SEQ ID NO: 151792 - protein, 9 aa, Homo Sapiens
AAHALREHL

SEQ ID NO: 151793 - protein, 9 aa, Homo Sapiens
AAHDALVEL

SEQ ID NO: 151794 - protein, 9 aa, Homo Sapiens
AAHLLGSTL

SEQ ID NO: 151795 - protein, 9 aa, Homo Sapiens
AAHLLNDAL

SEQ ID NO: 151796 - protein, 9 aa, Homo Sapiens
AAHVIAEDV

SEQ ID NO: 151797 - protein, 9 aa, Homo Sapiens
AAHWQFETA

SEQ ID NO: 151798 - protein, 9 aa, Homo Sapiens
AAIDHQIEV

SEQ ID NO: 151799 - protein, 9 aa, Homo Sapiens
AAIEDLNAV

SEQ ID NO: 151800 - protein, 9 aa, Homo Sapiens
AAIEGNLQL

SEQ ID NO: 151801 - protein, 9 aa, Homo Sapiens
AAIEIFEKV

SEQ ID NO: 151802 - protein, 9 aa, Homo Sapiens
AAIESGHKL

SEQ ID NO: 151803 - protein, 9 aa, Homo Sapiens
AAIEVHEVL

SEQ ID NO: 151804 - protein, 9 aa, Homo Sapiens
AAIGTDKEL

SEQ ID NO: 151805 - protein, 9 aa, Homo Sapiens
AAIHPSLEI

SEQ ID NO: 151806 - protein, 9 aa, Homo Sapiens
AAIKAFIAV

SEQ ID NO: 151807 - protein, 9 aa, Homo Sapiens
AAIKPGTPL

SEQ ID NO: 151808 - protein, 9 aa, Homo Sapiens
AAILGMHTL

SEQ ID NO: 151809 - protein, 9 aa, Homo Sapiens
AAILPDMAL

SEQ ID NO: 151810 - protein, 9 aa, Homo Sapiens
AAINHYIEA

SEQ ID NO: 151811 - protein, 9 aa, Homo Sapiens
AAINPNHPL

SEQ ID NO: 151812 - protein, 9 aa, Homo Sapiens
AAISQVDRL

SEQ ID NO: 151813 - protein, 9 aa, Homo Sapiens
AAIVEMQEL

SEQ ID NO: 151814 - protein, 9 aa, Homo Sapiens
AALDDGSAL

SEQ ID NO: 151815 - protein, 9 aa, Homo Sapiens
AALDERSTI

SEQ ID NO: 151816 - protein, 9 aa, Homo Sapiens
AALDEYEEL

SEQ ID NO: 151817 - protein, 9 aa, Homo Sapiens
AALDIYETL

SEQ ID NO: 151818 - protein, 9 aa, Homo Sapiens
AALDKATVL

SEQ ID NO: 151819 - protein, 9 aa, Homo Sapiens
AALDVYNAV

SEQ ID NO: 151820 - protein, 9 aa, Homo Sapiens
AALEDKNSL

SEQ ID NO: 151821 - protein, 9 aa, Homo Sapiens
AALFKAWAL

SEQ ID NO: 151822 - protein, 9 aa, Homo Sapiens
AALGPIREL

SEQ ID NO: 151823 - protein, 9 aa, Homo Sapiens
AALKPLETL

SEQ ID NO: 151824 - protein, 9 aa, Homo Sapiens
AALPVYQEL

SEQ ID NO: 151825 - protein, 9 aa, Homo Sapiens
AALQCMHAL

SEQ ID NO: 151826 - protein, 9 aa, Homo Sapiens
AALQDRSIL

SEQ ID NO: 151827 - protein, 9 aa, Homo Sapiens
AALQGDPAL

SEQ ID NO: 151828 - protein, 9 aa, Homo Sapiens
AALVDLDSL

SEQ ID NO: 151829 - protein, 9 aa, Homo Sapiens
AAMDAEIVL

SEQ ID NO: 151830 - protein, 9 aa, Homo Sapiens
AAMEDLTRL

SEQ ID NO: 151831 - protein, 9 aa, Homo Sapiens
AAMEFLQEL

SEQ ID NO: 151832 - protein, 9 aa, Homo Sapiens
AAMKALQAL

SEQ ID NO: 151833 - protein, 9 aa, Homo Sapiens
AAMKLMTAL

SEQ ID NO: 151834 - protein, 9 aa, Homo Sapiens
AAMYKSLEL

SEQ ID NO: 151835 - protein, 9 aa, Homo Sapiens
AANCINIPL

SEQ ID NO: 151836 - protein, 9 aa, Homo Sapiens
AANLLNDAL

SEQ ID NO: 151837 - protein, 9 aa, Homo Sapiens
AAPAYSRAL

SEQ ID NO: 151838 - protein, 9 aa, Homo Sapiens
AAPDGTRNL

SEQ ID NO: 151839 - protein, 9 aa, Homo Sapiens
AAPVPTTTL

SEQ ID NO: 151840 - protein, 9 aa, Homo Sapiens
AAQWQKEEM

SEQ ID NO: 151841 - protein, 9 aa, Homo Sapiens
AASAQLLRL

SEQ ID NO: 151842 - protein, 9 aa, Homo Sapiens
AASGHFICV

SEQ ID NO: 151843 - protein, 9 aa, Homo Sapiens
AASGLPLMV

SEQ ID NO: 151844 - protein, 9 aa, Homo Sapiens
AASKVMVEL

SEQ ID NO: 151845 - protein, 9 aa, Homo Sapiens
AASSSVCKL

SEQ ID NO: 151846 - protein, 9 aa, Homo Sapiens
AASVINQAL

SEQ ID NO: 151847 - protein, 9 aa, Homo Sapiens
AASYISQSL

SEQ ID NO: 151848 - protein, 9 aa, Homo Sapiens
AATAVTQAL

SEQ ID NO: 151849 - protein, 9 aa, Homo Sapiens
AATDIFSYL

SEQ ID NO: 151850 - protein, 9 aa, Homo Sapiens
AATDITSSL

SEQ ID NO: 151851 - protein, 9 aa, Homo Sapiens
AATEEAQAL

SEQ ID NO: 151852 - protein, 9 aa, Homo Sapiens
AATKILTEL

SEQ ID NO: 151853 - protein, 9 aa, Homo Sapiens
AATKVTTVL

SEQ ID NO: 151854 - protein, 9 aa, Homo Sapiens
AATLLHLEL

SEQ ID NO: 151855 - protein, 9 aa, Homo Sapiens
AATSATHEL

SEQ ID NO: 151856 - protein, 9 aa, Homo Sapiens
AATTVLQEL

SEQ ID NO: 151857 - protein, 9 aa, Homo Sapiens
AAVAPGHPL

SEQ ID NO: 151858 - protein, 9 aa, Homo Sapiens
AAVAPVLSI

SEQ ID NO: 151859 - protein, 9 aa, Homo Sapiens
AAVDAGMAM

SEQ ID NO: 151860 - protein, 9 aa, Homo Sapiens
AAVDPDSGL

SEQ ID NO: 151861 - protein, 9 aa, Homo Sapiens
AAVDQSECL

SEQ ID NO: 151862 - protein, 9 aa, Homo Sapiens
AAVDRTTEL

SEQ ID NO: 151863 - protein, 9 aa, Homo Sapiens
AAVDTNLTL

SEQ ID NO: 151864 - protein, 9 aa, Homo Sapiens
AAVEPDVVV

SEQ ID NO: 151865 - protein, 9 aa, Homo Sapiens
AAVKATQTL

SEQ ID NO: 151866 - protein, 9 aa, Homo Sapiens
AAVNVICEL

SEQ ID NO: 151867 - protein, 9 aa, Homo Sapiens
AAVPPAEEL

SEQ ID NO: 151868 - protein, 9 aa, Homo Sapiens
AAVRDISEA

SEQ ID NO: 151869 - protein, 9 aa, Homo Sapiens
AAWLQVLPV

SEQ ID NO: 151870 - protein, 9 aa, Homo Sapiens
AAYGHRLCL

SEQ ID NO: 151871 - protein, 9 aa, Homo Sapiens
AAYYHPSYL

SEQ ID NO: 151872 - protein, 9 aa, Homo Sapiens
AGADPSDPL

SEQ ID NO: 151873 - protein, 9 aa, Homo Sapiens
AGWEGTESL

SEQ ID NO: 151874 - protein, 9 aa, Homo Sapiens
AIAAVFHTL

SEQ ID NO: 151875 - protein, 9 aa, Homo Sapiens
AIIALFHLL

SEQ ID NO: 151876 - protein, 9 aa, Homo Sapiens
ALFTCEMLV

SEQ ID NO: 151877 - protein, 9 aa, Homo Sapiens
APAPAAHVA

SEQ ID NO: 151878 - protein, 9 aa, Homo Sapiens
APAPPKAEA

SEQ ID NO: 151879 - protein, 9 aa, Homo Sapiens
APGYSYTAA

SEQ ID NO: 151880 - protein, 9 aa, Homo Sapiens
APIQSEPRV

SEQ ID NO: 151881 - protein, 9 aa, Homo Sapiens
APKAGPGVV

SEQ ID NO: 151882 - protein, 9 aa, Homo Sapiens
APMPPIIHA

SEQ ID NO: 151883 - protein, 9 aa, Homo Sapiens
APRLQSEVA

SEQ ID NO: 151884 - protein, 9 aa, Homo Sapiens
APRPPVSAA

SEQ ID NO: 151885 - protein, 9 aa, Homo Sapiens
APRQPGLMA

SEQ ID NO: 151886 - protein, 9 aa, Homo Sapiens
APRTVALTA

SEQ ID NO: 151887 - protein, 9 aa, Homo Sapiens
APSVGIKAA

SEQ ID NO: 151888 - protein, 9 aa, Homo Sapiens
APTGDLPRA

SEQ ID NO: 151889 - protein, 9 aa, Homo Sapiens
APVPTAPAA

SEQ ID NO: 151890 - protein, 9 aa, Homo Sapiens
AQAEVYKEL

SEQ ID NO: 151891 - protein, 9 aa, Homo Sapiens
AQCVIYHEL

SEQ ID NO: 151892 - protein, 9 aa, Homo Sapiens
AQYEHDLEV

SEQ ID NO: 151893 - protein, 9 aa, Homo Sapiens
ARAGVVLEM

SEQ ID NO: 151894 - protein, 9 aa, Homo Sapiens
ASAAVLLTL

SEQ ID NO: 151895 - protein, 9 aa, Homo Sapiens
ASAPPGPPA

SEQ ID NO: 151896 - protein, 9 aa, Homo Sapiens
ASDDHTICL

SEQ ID NO: 151897 - protein, 9 aa, Homo Sapiens
ASDDHTVCL

SEQ ID NO: 151898 - protein, 9 aa, Homo Sapiens
ASDKETYEL

SEQ ID NO: 151899 - protein, 9 aa, Homo Sapiens
ASFFDRNTL

SEQ ID NO: 151900 - protein, 9 aa, Homo Sapiens
ASHGFYEFL

SEQ ID NO: 151901 - protein, 9 aa, Homo Sapiens
ASHIQLDSL

SEQ ID NO: 151902 - protein, 9 aa, Homo Sapiens
ASHLNLDAL

SEQ ID NO: 151903 - protein, 9 aa, Homo Sapiens
ASIPYFHAM

SEQ ID NO: 151904 - protein, 9 aa, Homo Sapiens
ASLLIQQAL

SEQ ID NO: 151905 - protein, 9 aa, Homo Sapiens
ASPSSIRSL

SEQ ID NO: 151906 - protein, 9 aa, Homo Sapiens
ASSPEHPEL

SEQ ID NO: 151907 - protein, 9 aa, Homo Sapiens
ASYTGAETL

SEQ ID NO: 151908 - protein, 9 aa, Homo Sapiens
ATDDSLHQL

SEQ ID NO: 151909 - protein, 9 aa, Homo Sapiens
AVADTLLVL

SEQ ID NO: 151910 - protein, 9 aa, Homo Sapiens
AVCGYLVEL

SEQ ID NO: 151911 - protein, 9 aa, Homo Sapiens
AVDGNTVEL

SEQ ID NO: 151912 - protein, 9 aa, Homo Sapiens
AVIGSTEEL

SEQ ID NO: 151913 - protein, 9 aa, Homo Sapiens
CAHSFFDEL

SEQ ID NO: 151914 - protein, 9 aa, Homo Sapiens
CAIAQAESL

SEQ ID NO: 151915 - protein, 9 aa, Homo Sapiens
CAIPDLGPA

SEQ ID NO: 151916 - protein, 9 aa, Homo Sapiens
CSIHDNSVL

SEQ ID NO: 151917 - protein, 9 aa, Homo Sapiens
EAAPDGPAL

SEQ ID NO: 151918 - protein, 9 aa, Homo Sapiens
EACGVIVEL

SEQ ID NO: 151919 - protein, 9 aa, Homo Sapiens
FAAASREVL

SEQ ID NO: 151920 - protein, 9 aa, Homo Sapiens
FAADIISVL

SEQ ID NO: 151921 - protein, 9 aa, Homo Sapiens
FAADLAEEL

SEQ ID NO: 151922 - protein, 9 aa, Homo Sapiens
FAADVRLMF

SEQ ID NO: 151923 - protein, 9 aa, Homo Sapiens
FAALHGPAL

SEQ ID NO: 151924 - protein, 9 aa, Homo Sapiens
FAANVYEAF

SEQ ID NO: 151925 - protein, 9 aa, Homo Sapiens
FACEKNENL

SEQ ID NO: 151926 - protein, 9 aa, Homo Sapiens
FACEVLYNI

SEQ ID NO: 151927 - protein, 9 aa, Homo Sapiens
FACPKTDSL

SEQ ID NO: 151928 - protein, 9 aa, Homo Sapiens
FADAGLVCI

SEQ ID NO: 151929 - protein, 9 aa, Homo Sapiens
FADALEVIP

SEQ ID NO: 151930 - protein, 9 aa, Homo Sapiens
FADCAILLL

SEQ ID NO: 151931 - protein, 9 aa, Homo Sapiens
FADDPCSSV

SEQ ID NO: 151932 - protein, 9 aa, Homo Sapiens
FADELSHLL

SEQ ID NO: 151933 - protein, 9 aa, Homo Sapiens
FADFERHFL

SEQ ID NO: 151934 - protein, 9 aa, Homo Sapiens
FADGHVLEL

SEQ ID NO: 151935 - protein, 9 aa, Homo Sapiens
FADGKVYAL

SEQ ID NO: 151936 - protein, 9 aa, Homo Sapiens
FADGVYLVL

SEQ ID NO: 151937 - protein, 9 aa, Homo Sapiens
FADHVSSSL

SEQ ID NO: 151938 - protein, 9 aa, Homo Sapiens
FADHVVPLL

SEQ ID NO: 151939 - protein, 9 aa, Homo Sapiens
FADKHIQVL

SEQ ID NO: 151940 - protein, 9 aa, Homo Sapiens
FADKTLLEL

SEQ ID NO: 151941 - protein, 9 aa, Homo Sapiens
FADNPGPMV

SEQ ID NO: 151942 - protein, 9 aa, Homo Sapiens
FADPIAANL

SEQ ID NO: 151943 - protein, 9 aa, Homo Sapiens
FADQAEILL

SEQ ID NO: 151944 - protein, 9 aa, Homo Sapiens
FADQEVRSL

SEQ ID NO: 151945 - protein, 9 aa, Homo Sapiens
FADQTAVQL

SEQ ID NO: 151946 - protein, 9 aa, Homo Sapiens
FADREVQLL

SEQ ID NO: 151947 - protein, 9 aa, Homo Sapiens
FADVAPLQL

SEQ ID NO: 151948 - protein, 9 aa, Homo Sapiens
FADYLAHES

SEQ ID NO: 151949 - protein, 9 aa, Homo Sapiens
FADYNLLDL

SEQ ID NO: 151950 - protein, 9 aa, Homo Sapiens
FADYPCHTV

SEQ ID NO: 151951 - protein, 9 aa, Homo Sapiens
FADYRPTEV

SEQ ID NO: 151952 - protein, 9 aa, Homo Sapiens
FAEAGRSTL

SEQ ID NO: 151953 - protein, 9 aa, Homo Sapiens
FAEDPPTSL

SEQ ID NO: 151954 - protein, 9 aa, Homo Sapiens
FAEEPGLVL

SEQ ID NO: 151955 - protein, 9 aa, Homo Sapiens
FAEESYQKL

SEQ ID NO: 151956 - protein, 9 aa, Homo Sapiens
FAEEVGAAL

SEQ ID NO: 151957 - protein, 9 aa, Homo Sapiens
FAFLISERL

SEQ ID NO: 151958 - protein, 9 aa, Homo Sapiens
FAGDDAPRA

SEQ ID NO: 151959 - protein, 9 aa, Homo Sapiens
FAGYSEEVL

SEQ ID NO: 151960 - protein, 9 aa, Homo Sapiens
FAHCLELTV

SEQ ID NO: 151961 - protein, 9 aa, Homo Sapiens
FAHHLPVWL

SEQ ID NO: 151962 - protein, 9 aa, Homo Sapiens
FAHIDGDHL

SEQ ID NO: 151963 - protein, 9 aa, Homo Sapiens
FAHPPLLVL

SEQ ID NO: 151964 - protein, 9 aa, Homo Sapiens
FAHPYQYEL

SEQ ID NO: 151965 - protein, 9 aa, Homo Sapiens
FAHRIWDTL

SEQ ID NO: 151966 - protein, 9 aa, Homo Sapiens
FAHTNVESL

SEQ ID NO: 151967 - protein, 9 aa, Homo Sapiens
FAHVIFQNV

SEQ ID NO: 151968 - protein, 9 aa, Homo Sapiens
FAIDIGGSL

SEQ ID NO: 151969 - protein, 9 aa, Homo Sapiens
FAIDPHLLL

SEQ ID NO: 151970 - protein, 9 aa, Homo Sapiens
FAIPGSSFL

SEQ ID NO: 151971 - protein, 9 aa, Homo Sapiens
FAIPLIEKL

SEQ ID NO: 151972 - protein, 9 aa, Homo Sapiens
FAIPMIHAV

SEQ ID NO: 151973 - protein, 9 aa, Homo Sapiens
FAISILQQI

SEQ ID NO: 151974 - protein, 9 aa, Homo Sapiens
FALDSGLEI

SEQ ID NO: 151975 - protein, 9 aa, Homo Sapiens
FALNLFKHL

SEQ ID NO: 151976 - protein, 9 aa, Homo Sapiens
FALPILNAL

SEQ ID NO: 151977 - protein, 9 aa, Homo Sapiens
FALSKDASL

SEQ ID NO: 151978 - protein, 9 aa, Homo Sapiens
FAMAGHENL

SEQ ID NO: 151979 - protein, 9 aa, Homo Sapiens
FAMDVYKNL

SEQ ID NO: 151980 - protein, 9 aa, Homo Sapiens
FAMEIDPSL

SEQ ID NO: 151981 - protein, 9 aa, Homo Sapiens
FAMPYFIQV

SEQ ID NO: 151982 - protein, 9 aa, Homo Sapiens
FANDDRHVM

SEQ ID NO: 151983 - protein, 9 aa, Homo Sapiens
FANLIKEFV

SEQ ID NO: 151984 - protein, 9 aa, Homo Sapiens
FAQEAISVL

SEQ ID NO: 151985 - protein, 9 aa, Homo Sapiens
FAQEALTVL

SEQ ID NO: 151986 - protein, 9 aa, Homo Sapiens
FAQGDVITL

SEQ ID NO: 151987 - protein, 9 aa, Homo Sapiens
FAQTLHPSL

SEQ ID NO: 151988 - protein, 9 aa, Homo Sapiens
FASDVQFVL

SEQ ID NO: 151989 - protein, 9 aa, Homo Sapiens
FASEVSNVL

SEQ ID NO: 151990 - protein, 9 aa, Homo Sapiens
FASFPHMVL

SEQ ID NO: 151991 - protein, 9 aa, Homo Sapiens
FASHVSPEV

SEQ ID NO: 151992 - protein, 9 aa, Homo Sapiens
FASSFKIVL

SEQ ID NO: 151993 - protein, 9 aa, Homo Sapiens
FASTMVHAL

SEQ ID NO: 151994 - protein, 9 aa, Homo Sapiens
FASYMEQHL

SEQ ID NO: 151995 - protein, 9 aa, Homo Sapiens
FATADEYHL

SEQ ID NO: 151996 - protein, 9 aa, Homo Sapiens
FATEVRAVI

SEQ ID NO: 151997 - protein, 9 aa, Homo Sapiens
FATGSADAL

SEQ ID NO: 151998 - protein, 9 aa, Homo Sapiens
FAVATPEEL

SEQ ID NO: 151999 - protein, 9 aa, Homo Sapiens
FAVEEGDHL

SEQ ID NO: 152000 - protein, 9 aa, Homo Sapiens
FAVHPEPEA

SEQ ID NO: 152001 - protein, 9 aa, Homo Sapiens
FAVLEDHTL

SEQ ID NO: 152002 - protein, 9 aa, Homo Sapiens
FAVNMFRTL

SEQ ID NO: 152003 - protein, 9 aa, Homo Sapiens
FAVPENSSV

SEQ ID NO: 152004 - protein, 9 aa, Homo Sapiens
FAVPESDHL

SEQ ID NO: 152005 - protein, 9 aa, Homo Sapiens
FAVSDGLEL

SEQ ID NO: 152006 - protein, 9 aa, Homo Sapiens
FAVVPSTAT

SEQ ID NO: 152007 - protein, 9 aa, Homo Sapiens
FAYEGPMYL

SEQ ID NO: 152008 - protein, 9 aa, Homo Sapiens
FAYPAPLEV

SEQ ID NO: 152009 - protein, 9 aa, Homo Sapiens
FAYVEGESL

SEQ ID NO: 152010 - protein, 9 aa, Homo Sapiens
FGHIFNDAL

SEQ ID NO: 152011 - protein, 9 aa, Homo Sapiens
FGHVQRAEM

SEQ ID NO: 152012 - protein, 9 aa, Homo Sapiens
FGHYQQAEL

SEQ ID NO: 152013 - protein, 9 aa, Homo Sapiens
FGIDRPAEL

SEQ ID NO: 152014 - protein, 9 aa, Homo Sapiens
FGLNIFHQL

SEQ ID NO: 152015 - protein, 9 aa, Homo Sapiens
FGSEFSPEL

SEQ ID NO: 152016 - protein, 9 aa, Homo Sapiens
FGVDPDKEL

SEQ ID NO: 152017 - protein, 9 aa, Homo Sapiens
FGVIPSTPL

SEQ ID NO: 152018 - protein, 9 aa, Homo Sapiens
FGYDKDTSL

SEQ ID NO: 152019 - protein, 9 aa, Homo Sapiens
FGYDKPHVL

SEQ ID NO: 152020 - protein, 9 aa, Homo Sapiens
FIADHCPTL

SEQ ID NO: 152021 - protein, 9 aa, Homo Sapiens
FIAPTGHSL

SEQ ID NO: 152022 - protein, 9 aa, Homo Sapiens
FICNIFDYL

SEQ ID NO: 152023 - protein, 9 aa, Homo Sapiens
FICPITREL

SEQ ID NO: 152024 - protein, 9 aa, Homo Sapiens
FIDDANYSV

SEQ ID NO: 152025 - protein, 9 aa, Homo Sapiens
FIDGHFVEM

SEQ ID NO: 152026 - protein, 9 aa, Homo Sapiens
FIEDAVHVL

SEQ ID NO: 152027 - protein, 9 aa, Homo Sapiens
FIESAHTEL

SEQ ID NO: 152028 - protein, 9 aa, Homo Sapiens
FIFSDTHEL

SEQ ID NO: 152029 - protein, 9 aa, Homo Sapiens
FIHQHFVEV

SEQ ID NO: 152030 - protein, 9 aa, Homo Sapiens
FIIDDKGIL

SEQ ID NO: 152031 - protein, 9 aa, Homo Sapiens
FIISDFESV

SEQ ID NO: 152032 - protein, 9 aa, Homo Sapiens
FIISRTQAL

SEQ ID NO: 152033 - protein, 9 aa, Homo Sapiens
FIIYDTHSL

SEQ ID NO: 152034 - protein, 9 aa, Homo Sapiens
FISHLFMQL

SEQ ID NO: 152035 - protein, 9 aa, Homo Sapiens
FIVEETLPL

SEQ ID NO: 152036 - protein, 9 aa, Homo Sapiens
FIVSDESIL

SEQ ID NO: 152037 - protein, 9 aa, Homo Sapiens
FLAHIYTEL

SEQ ID NO: 152038 - protein, 9 aa, Homo Sapiens
FLCPFHLSV

SEQ ID NO: 152039 - protein, 9 aa, Homo Sapiens
FLDDNQIIT

SEQ ID NO: 152040 - protein, 9 aa, Homo Sapiens
FLDDNQIVT

SEQ ID NO: 152041 - protein, 9 aa, Homo Sapiens
FLDDVNLIL

SEQ ID NO: 152042 - protein, 9 aa, Homo Sapiens
FLDEKTHEL

SEQ ID NO: 152043 - protein, 9 aa, Homo Sapiens
FLDGNELTL

SEQ ID NO: 152044 - protein, 9 aa, Homo Sapiens
FLDGNEMTL

SEQ ID NO: 152045 - protein, 9 aa, Homo Sapiens
FLDSTSPLL

SEQ ID NO: 152046 - protein, 9 aa, Homo Sapiens
FLFSKFIEL

SEQ ID NO: 152047 - protein, 9 aa, Homo Sapiens
FLIRESETL

SEQ ID NO: 152048 - protein, 9 aa, Homo Sapiens
FLPDHPIVL

SEQ ID NO: 152049 - protein, 9 aa, Homo Sapiens
FLVPTFEQL

SEQ ID NO: 152050 - protein, 9 aa, Homo Sapiens
FLYPFPLAL

SEQ ID NO: 152051 - protein, 9 aa, Homo Sapiens
FMSLLEDTL

SEQ ID NO: 152052 - protein, 9 aa, Homo Sapiens
FNDSTRLIL

SEQ ID NO: 152053 - protein, 9 aa, Homo Sapiens
FQCQTKLEL

SEQ ID NO: 152054 - protein, 9 aa, Homo Sapiens
FQDHTKLIL

SEQ ID NO: 152055 - protein, 9 aa, Homo Sapiens
FQDPVPLTV

SEQ ID NO: 152056 - protein, 9 aa, Homo Sapiens
FQEADSPTL

SEQ ID NO: 152057 - protein, 9 aa, Homo Sapiens
FQVNHTVAL

SEQ ID NO: 152058 - protein, 9 aa, Homo Sapiens
FRVPTANVS

SEQ ID NO: 152059 - protein, 9 aa, Homo Sapiens
FSCGVISTL

SEQ ID NO: 152060 - protein, 9 aa, Homo Sapiens
FSDDSDLQL

SEQ ID NO: 152061 - protein, 9 aa, Homo Sapiens
FSDLTMHEL

SEQ ID NO: 152062 - protein, 9 aa, Homo Sapiens
FSDPESQTL

SEQ ID NO: 152063 - protein, 9 aa, Homo Sapiens
FSDPIHPQL

SEQ ID NO: 152064 - protein, 9 aa, Homo Sapiens
FSEETPVVL

SEQ ID NO: 152065 - protein, 9 aa, Homo Sapiens
FSEPFHLIV

SEQ ID NO: 152066 - protein, 9 aa, Homo Sapiens
FSFDGPEIM

SEQ ID NO: 152067 - protein, 9 aa, Homo Sapiens
FSFPEPEAL

SEQ ID NO: 152068 - protein, 9 aa, Homo Sapiens
FSFYFHEAL

SEQ ID NO: 152069 - protein, 9 aa, Homo Sapiens
FSHAQTVVL

SEQ ID NO: 152070 - protein, 9 aa, Homo Sapiens
FSHGQVVSL

SEQ ID NO: 152071 - protein, 9 aa, Homo Sapiens
FSHTQVIEL

SEQ ID NO: 152072 - protein, 9 aa, Homo Sapiens
FSHYMEENL

SEQ ID NO: 152073 - protein, 9 aa, Homo Sapiens
FSIDSPDSL

SEQ ID NO: 152074 - protein, 9 aa, Homo Sapiens
FSIEPWLKV

SEQ ID NO: 152075 - protein, 9 aa, Homo Sapiens
FSIGADTAL

SEQ ID NO: 152076 - protein, 9 aa, Homo Sapiens
FSITPLSEL

SEQ ID NO: 152077 - protein, 9 aa, Homo Sapiens
FSLDDVEVL

SEQ ID NO: 152078 - protein, 9 aa, Homo Sapiens
FSLDLVHTL

SEQ ID NO: 152079 - protein, 9 aa, Homo Sapiens
FSLPHPEAL

SEQ ID NO: 152080 - protein, 9 aa, Homo Sapiens
FSNVFEHYL

SEQ ID NO: 152081 - protein, 9 aa, Homo Sapiens
FSQALQHAL

SEQ ID NO: 152082 - protein, 9 aa, Homo Sapiens
FSQVIPVSL

SEQ ID NO: 152083 - protein, 9 aa, Homo Sapiens
FSSDVTHEM

SEQ ID NO: 152084 - protein, 9 aa, Homo Sapiens
FSSSDFSDL

SEQ ID NO: 152085 - protein, 9 aa, Homo Sapiens
FSVGADTAL

SEQ ID NO: 152086 - protein, 9 aa, Homo Sapiens
FSYAFPKAV

SEQ ID NO: 152087 - protein, 9 aa, Homo Sapiens
FTAPATVSL

SEQ ID NO: 152088 - protein, 9 aa, Homo Sapiens
FTDDQLLVL

SEQ ID NO: 152089 - protein, 9 aa, Homo Sapiens
FTEWLHEVL

SEQ ID NO: 152090 - protein, 9 aa, Homo Sapiens
FTFIFCHEL

SEQ ID NO: 152091 - protein, 9 aa, Homo Sapiens
FTSAAFHEL

SEQ ID NO: 152092 - protein, 9 aa, Homo Sapiens
FVADVRLIF

SEQ ID NO: 152093 - protein, 9 aa, Homo Sapiens
FVAEGGPEL

SEQ ID NO: 152094 - protein, 9 aa, Homo Sapiens
FVAETHIVL

SEQ ID NO: 152095 - protein, 9 aa, Homo Sapiens
FVALPGVAV

SEQ ID NO: 152096 - protein, 9 aa, Homo Sapiens
FVAPPTAAV

SEQ ID NO: 152097 - protein, 9 aa, Homo Sapiens
FVCDIRPEI

SEQ ID NO: 152098 - protein, 9 aa, Homo Sapiens
FVCPTEIVA

SEQ ID NO: 152099 - protein, 9 aa, Homo Sapiens
FVDELRITL

SEQ ID NO: 152100 - protein, 9 aa, Homo Sapiens
FVDGSAIQV

SEQ ID NO: 152101 - protein, 9 aa, Homo Sapiens
FVDPAQITM

SEQ ID NO: 152102 - protein, 9 aa, Homo Sapiens
FVDQCKTVL

SEQ ID NO: 152103 - protein, 9 aa, Homo Sapiens
FVDRSLLTL

SEQ ID NO: 152104 - protein, 9 aa, Homo Sapiens
FVFDERYAL

SEQ ID NO: 152105 - protein, 9 aa, Homo Sapiens
FVFPGELLL

SEQ ID NO: 152106 - protein, 9 aa, Homo Sapiens
FVHAQCLEL

SEQ ID NO: 152107 - protein, 9 aa, Homo Sapiens
FVHDLVLYL

SEQ ID NO: 152108 - protein, 9 aa, Homo Sapiens
FVIDEAHCV

SEQ ID NO: 152109 - protein, 9 aa, Homo Sapiens
FVIDLQTRL

SEQ ID NO: 152110 - protein, 9 aa, Homo Sapiens
FVINEVCEM

SEQ ID NO: 152111 - protein, 9 aa, Homo Sapiens
FVIPVVQAL

SEQ ID NO: 152112 - protein, 9 aa, Homo Sapiens
FVMETFVHL

SEQ ID NO: 152113 - protein, 9 aa, Homo Sapiens
FVNDIFERI

SEQ ID NO: 152114 - protein, 9 aa, Homo Sapiens
FVYEDMEAL

SEQ ID NO: 152115 - protein, 9 aa, Homo Sapiens
FVYGESVEL

SEQ ID NO: 152116 - protein, 9 aa, Homo Sapiens
GADPSTVEM

SEQ ID NO: 152117 - protein, 9 aa, Homo Sapiens
GATAAAPVP

SEQ ID NO: 152118 - protein, 9 aa, Homo Sapiens
GAVDPLLAL

SEQ ID NO: 152119 - protein, 9 aa, Homo Sapiens
GAVEPICSV

SEQ ID NO: 152120 - protein, 9 aa, Homo Sapiens
GAVPIFIEL

SEQ ID NO: 152121 - protein, 9 aa, Homo Sapiens
GPLVAMILA

SEQ ID NO: 152122 - protein, 9 aa, Homo Sapiens
HAAASFETL

SEQ ID NO: 152123 - protein, 9 aa, Homo Sapiens
HAAHIISEL

SEQ ID NO: 152124 - protein, 9 aa, Homo Sapiens
HAASVFLTL

SEQ ID NO: 152125 - protein, 9 aa, Homo Sapiens
HACALAASL

SEQ ID NO: 152126 - protein, 9 aa, Homo Sapiens
HACGVIATI

SEQ ID NO: 152127 - protein, 9 aa, Homo Sapiens
HACPLLSTL

SEQ ID NO: 152128 - protein, 9 aa, Homo Sapiens
HADDSFLVL

SEQ ID NO: 152129 - protein, 9 aa, Homo Sapiens
HADHSSLTL

SEQ ID NO: 152130 - protein, 9 aa, Homo Sapiens
HADPEPSVI

SEQ ID NO: 152131 - protein, 9 aa, Homo Sapiens
HADPTELAL

SEQ ID NO: 152132 - protein, 9 aa, Homo Sapiens
HAHTIKPAL

SEQ ID NO: 152133 - protein, 9 aa, Homo Sapiens
HAIEESVVL

SEQ ID NO: 152134 - protein, 9 aa, Homo Sapiens
HAIPPTLAM

SEQ ID NO: 152135 - protein, 9 aa, Homo Sapiens
HALDYADEL

SEQ ID NO: 152136 - protein, 9 aa, Homo Sapiens
HAMVILLTL

SEQ ID NO: 152137 - protein, 9 aa, Homo Sapiens
HASDAYTAL

SEQ ID NO: 152138 - protein, 9 aa, Homo Sapiens
HAVGPSTAM

SEQ ID NO: 152139 - protein, 9 aa, Homo Sapiens
HAVGPSTSL

SEQ ID NO: 152140 - protein, 9 aa, Homo Sapiens
HAVSDPSIL

SEQ ID NO: 152141 - protein, 9 aa, Homo Sapiens
HAYDGKDYI

SEQ ID NO: 152142 - protein, 9 aa, Homo Sapiens
HICMVFEVL

SEQ ID NO: 152143 - protein, 9 aa, Homo Sapiens
HICQLYHVL

SEQ ID NO: 152144 - protein, 9 aa, Homo Sapiens
HIDPNFASL

SEQ ID NO: 152145 - protein, 9 aa, Homo Sapiens
HIIEDPCTL

SEQ ID NO: 152146 - protein, 9 aa, Homo Sapiens
HPYRLILTV

SEQ ID NO: 152147 - protein, 9 aa, Homo Sapiens
HSMLDINAL

SEQ ID NO: 152148 - protein, 9 aa, Homo Sapiens
HSNTIVVSL

SEQ ID NO: 152149 - protein, 9 aa, Homo Sapiens
HVDGHLYEL

SEQ ID NO: 152150 - protein, 9 aa, Homo Sapiens
HVDSTWLLL

SEQ ID NO: 152151 - protein, 9 aa, Homo Sapiens
IAAGIFNDL

SEQ ID NO: 152152 - protein, 9 aa, Homo Sapiens
IAAGVCGAL

SEQ ID NO: 152153 - protein, 9 aa, Homo Sapiens
IAAMPLISL

SEQ ID NO: 152154 - protein, 9 aa, Homo Sapiens
IAAPELETL

SEQ ID NO: 152155 - protein, 9 aa, Homo Sapiens
IAAPTSSAL

SEQ ID NO: 152156 - protein, 9 aa, Homo Sapiens
IAAVTDIPL

SEQ ID NO: 152157 - protein, 9 aa, Homo Sapiens
IADDTRVVV

SEQ ID NO: 152158 - protein, 9 aa, Homo Sapiens
IADEAFYGL

SEQ ID NO: 152159 - protein, 9 aa, Homo Sapiens
IADEGTYTL

SEQ ID NO: 152160 - protein, 9 aa, Homo Sapiens
IADGLCLEV

SEQ ID NO: 152161 - protein, 9 aa, Homo Sapiens
IADGLPVAV

SEQ ID NO: 152162 - protein, 9 aa, Homo Sapiens
IADHYMQVL

SEQ ID NO: 152163 - protein, 9 aa, Homo Sapiens
IADNVFLFL

SEQ ID NO: 152164 - protein, 9 aa, Homo Sapiens
IADPDQPVL

SEQ ID NO: 152165 - protein, 9 aa, Homo Sapiens
IADPNIAKL

SEQ ID NO: 152166 - protein, 9 aa, Homo Sapiens
IADPRGNTL

SEQ ID NO: 152167 - protein, 9 aa, Homo Sapiens
IADPTLAEM

SEQ ID NO: 152168 - protein, 9 aa, Homo Sapiens
IADSNPMVV

SEQ ID NO: 152169 - protein, 9 aa, Homo Sapiens
IADSPSPAV

SEQ ID NO: 152170 - protein, 9 aa, Homo Sapiens
IADTNFDVL

SEQ ID NO: 152171 - protein, 9 aa, Homo Sapiens
IAFPTSISV

SEQ ID NO: 152172 - protein, 9 aa, Homo Sapiens
IAGEFKEQL

SEQ ID NO: 152173 - protein, 9 aa, Homo Sapiens
IAHELGHSL

SEQ ID NO: 152174 - protein, 9 aa, Homo Sapiens
IAHFLDRHL

SEQ ID NO: 152175 - protein, 9 aa, Homo Sapiens
IAHLEITAL

SEQ ID NO: 152176 - protein, 9 aa, Homo Sapiens
IAHNMQSTL

SEQ ID NO: 152177 - protein, 9 aa, Homo Sapiens
IAIAPNGAL

SEQ ID NO: 152178 - protein, 9 aa, Homo Sapiens
IAIEDPFSV

SEQ ID NO: 152179 - protein, 9 aa, Homo Sapiens
IAIEDPYSV

SEQ ID NO: 152180 - protein, 9 aa, Homo Sapiens
IALDKDAPL

SEQ ID NO: 152181 - protein, 9 aa, Homo Sapiens
IALGEFSTL

SEQ ID NO: 152182 - protein, 9 aa, Homo Sapiens
IAMDLILKM

SEQ ID NO: 152183 - protein, 9 aa, Homo Sapiens
IAQDFKTDL

SEQ ID NO: 152184 - protein, 9 aa, Homo Sapiens
IAQGSYIAL

SEQ ID NO: 152185 - protein, 9 aa, Homo Sapiens
IASAIVNEL

SEQ ID NO: 152186 - protein, 9 aa, Homo Sapiens
IASPVIAAV

SEQ ID NO: 152187 - protein, 9 aa, Homo Sapiens
IASPVQPVL

SEQ ID NO: 152188 - protein, 9 aa, Homo Sapiens
IATDDITEL

SEQ ID NO: 152189 - protein, 9 aa, Homo Sapiens
IATELLKLN

SEQ ID NO: 152190 - protein, 9 aa, Homo Sapiens
IAVEAQEIL

SEQ ID NO: 152191 - protein, 9 aa, Homo Sapiens
IAYLIVKEL

SEQ ID NO: 152192 - protein, 9 aa, Homo Sapiens
IGAPVGISL

SEQ ID NO: 152193 - protein, 9 aa, Homo Sapiens
IIDDPNLVV

SEQ ID NO: 152194 - protein, 9 aa, Homo Sapiens
IIDDTIFNL

SEQ ID NO: 152195 - protein, 9 aa, Homo Sapiens
IIDDVMKEL

SEQ ID NO: 152196 - protein, 9 aa, Homo Sapiens
IIDETMAQL

SEQ ID NO: 152197 - protein, 9 aa, Homo Sapiens
IIDRTNTTL

SEQ ID NO: 152198 - protein, 9 aa, Homo Sapiens
IIFEDDRCL

SEQ ID NO: 152199 - protein, 9 aa, Homo Sapiens
IITDFDMTL

SEQ ID NO: 152200 - protein, 9 aa, Homo Sapiens
IITKAYLEV

SEQ ID NO: 152201 - protein, 9 aa, Homo Sapiens
IITTVGPEL

SEQ ID NO: 152202 - protein, 9 aa, Homo Sapiens
IIVDIFHGL

SEQ ID NO: 152203 - protein, 9 aa, Homo Sapiens
IIYDIMNEL

SEQ ID NO: 152204 - protein, 9 aa, Homo Sapiens
ILADCTLIL

SEQ ID NO: 152205 - protein, 9 aa, Homo Sapiens
ILDPHVVLL

SEQ ID NO: 152206 - protein, 9 aa, Homo Sapiens
INKKEGICA

SEQ ID NO: 152207 - protein, 9 aa, Homo Sapiens
IPFYGILGA

SEQ ID NO: 152208 - protein, 9 aa, Homo Sapiens
IPHLVTHDA

SEQ ID NO: 152209 - protein, 9 aa, Homo Sapiens
IQCEIFQVL

SEQ ID NO: 152210 - protein, 9 aa, Homo Sapiens
IQRTPKIQV

SEQ ID NO: 152211 - protein, 9 aa, Homo Sapiens
ISCKEELLL

SEQ ID NO: 152212 - protein, 9 aa, Homo Sapiens
ISDPFIFNL

SEQ ID NO: 152213 - protein, 9 aa, Homo Sapiens
ISDTQRISL

SEQ ID NO: 152214 - protein, 9 aa, Homo Sapiens
ISFECSEAL

SEQ ID NO: 152215 - protein, 9 aa, Homo Sapiens
ISFFIGQEL

SEQ ID NO: 152216 - protein, 9 aa, Homo Sapiens
ISHCYPEYL

SEQ ID NO: 152217 - protein, 9 aa, Homo Sapiens
ISHVIVDEI

SEQ ID NO: 152218 - protein, 9 aa, Homo Sapiens
ISISDHTAL

SEQ ID NO: 152219 - protein, 9 aa, Homo Sapiens
ISQVFEIAL

SEQ ID NO: 152220 - protein, 9 aa, Homo Sapiens
ISSLLEEQF

SEQ ID NO: 152221 - protein, 9 aa, Homo Sapiens
ISSPVVTSL

SEQ ID NO: 152222 - protein, 9 aa, Homo Sapiens
ISVASFQEL

SEQ ID NO: 152223 - protein, 9 aa, Homo Sapiens
ITAPPGTAA

SEQ ID NO: 152224 - protein, 9 aa, Homo Sapiens
ITAPPSRVL

SEQ ID NO: 152225 - protein, 9 aa, Homo Sapiens
ITDPSVIVM

SEQ ID NO: 152226 - protein, 9 aa, Homo Sapiens
ITHLLGVAL

SEQ ID NO: 152227 - protein, 9 aa, Homo Sapiens
ITTDCLQIL

SEQ ID NO: 152228 - protein, 9 aa, Homo Sapiens
ITTEVVNEL

SEQ ID NO: 152229 - protein, 9 aa, Homo Sapiens
ITYDDRFNL

SEQ ID NO: 152230 - protein, 9 aa, Homo Sapiens
IVDNTTMQL

SEQ ID NO: 152231 - protein, 9 aa, Homo Sapiens
IVDQVMVTL

SEQ ID NO: 152232 - protein, 9 aa, Homo Sapiens
IVIDPKNPL

SEQ ID NO: 152233 - protein, 9 aa, Homo Sapiens
IVIGVLHQL

SEQ ID NO: 152234 - protein, 9 aa, Homo Sapiens
IVKPVKVSA

SEQ ID NO: 152235 - protein, 9 aa, Homo Sapiens
KAAAAKVEL

SEQ ID NO: 152236 - protein, 9 aa, Homo Sapiens
KAADIDQEV

SEQ ID NO: 152237 - protein, 9 aa, Homo Sapiens
KAADTIEAL

SEQ ID NO: 152238 - protein, 9 aa, Homo Sapiens
KAAELEMEL

SEQ ID NO: 152239 - protein, 9 aa, Homo Sapiens
KAASVRPVL

SEQ ID NO: 152240 - protein, 9 aa, Homo Sapiens
KACDYIQEL

SEQ ID NO: 152241 - protein, 9 aa, Homo Sapiens
KACDYIREL

SEQ ID NO: 152242 - protein, 9 aa, Homo Sapiens
KACFLYFKL

SEQ ID NO: 152243 - protein, 9 aa, Homo Sapiens
KADAVVPEL

SEQ ID NO: 152244 - protein, 9 aa, Homo Sapiens
KADGVGPPL

SEQ ID NO: 152245 - protein, 9 aa, Homo Sapiens
KADGVPVYL

SEQ ID NO: 152246 - protein, 9 aa, Homo Sapiens
KADMNVHLL

SEQ ID NO: 152247 - protein, 9 aa, Homo Sapiens
KADNVGSAL

SEQ ID NO: 152248 - protein, 9 aa, Homo Sapiens
KADPQGPEL

SEQ ID NO: 152249 - protein, 9 aa, Homo Sapiens
KADPSHFEL

SEQ ID NO: 152250 - protein, 9 aa, Homo Sapiens
KADSVVVLL

SEQ ID NO: 152251 - protein, 9 aa, Homo Sapiens
KAFADPEVL

SEQ ID NO: 152252 - protein, 9 aa, Homo Sapiens
KAFADSSYL

SEQ ID NO: 152253 - protein, 9 aa, Homo Sapiens
KAFFDRSSL

SEQ ID NO: 152254 - protein, 9 aa, Homo Sapiens
KAFFTSKAL

SEQ ID NO: 152255 - protein, 9 aa, Homo Sapiens
KAFNDPSAL

SEQ ID NO: 152256 - protein, 9 aa, Homo Sapiens
KAFQKIVVL

SEQ ID NO: 152257 - protein, 9 aa, Homo Sapiens
KAFSDCSAL

SEQ ID NO: 152258 - protein, 9 aa, Homo Sapiens
KAFSDHSSL

SEQ ID NO: 152259 - protein, 9 aa, Homo Sapiens
KAFTQTSHL

SEQ ID NO: 152260 - protein, 9 aa, Homo Sapiens
KAFVFSVAL

SEQ ID NO: 152261 - protein, 9 aa, Homo Sapiens
KAHLMEIQV

SEQ ID NO: 152262 - protein, 9 aa, Homo Sapiens
KAHVFECNL

SEQ ID NO: 152263 - protein, 9 aa, Homo Sapiens
KAIDIYEQV

SEQ ID NO: 152264 - protein, 9 aa, Homo Sapiens
KAIDLMNAL

SEQ ID NO: 152265 - protein, 9 aa, Homo Sapiens
KAIEQADLL

SEQ ID NO: 152266 - protein, 9 aa, Homo Sapiens
KAIEVLLTL

SEQ ID NO: 152267 - protein, 9 aa, Homo Sapiens
KAIGLFISF

SEQ ID NO: 152268 - protein, 9 aa, Homo Sapiens
KAIGPHDVL

SEQ ID NO: 152269 - protein, 9 aa, Homo Sapiens
KAINVFVSA

SEQ ID NO: 152270 - protein, 9 aa, Homo Sapiens
KAIQDTNNL

SEQ ID NO: 152271 - protein, 9 aa, Homo Sapiens
KAIRPQIDL

SEQ ID NO: 152272 - protein, 9 aa, Homo Sapiens
KAIRPYHAL

SEQ ID NO: 152273 - protein, 9 aa, Homo Sapiens
KAISGVHTV

SEQ ID NO: 152274 - protein, 9 aa, Homo Sapiens
KALEEANAL

SEQ ID NO: 152275 - protein, 9 aa, Homo Sapiens
KALGIDNVL

SEQ ID NO: 152276 - protein, 9 aa, Homo Sapiens
KALSIFNEL

SEQ ID NO: 152277 - protein, 9 aa, Homo Sapiens
KAMDDTFYL

SEQ ID NO: 152278 - protein, 9 aa, Homo Sapiens
KAMELIREL

SEQ ID NO: 152279 - protein, 9 aa, Homo Sapiens
KAPGSTSNL

SEQ ID NO: 152280 - protein, 9 aa, Homo Sapiens
KAQLQQVEA

SEQ ID NO: 152281 - protein, 9 aa, Homo Sapiens
KASAVYQAL

SEQ ID NO: 152282 - protein, 9 aa, Homo Sapiens
KASDLYITL

SEQ ID NO: 152283 - protein, 9 aa, Homo Sapiens
KASIEHEAL

SEQ ID NO: 152284 - protein, 9 aa, Homo Sapiens
KASIIFVTL

SEQ ID NO: 152285 - protein, 9 aa, Homo Sapiens
KAVDNTCKL

SEQ ID NO: 152286 - protein, 9 aa, Homo Sapiens
KAVEHLDDL

SEQ ID NO: 152287 - protein, 9 aa, Homo Sapiens
KAVEIYASV

SEQ ID NO: 152288 - protein, 9 aa, Homo Sapiens
KAVNPDEAV

SEQ ID NO: 152289 - protein, 9 aa, Homo Sapiens
KAVNPGRSL

SEQ ID NO: 152290 - protein, 9 aa, Homo Sapiens
KAYYAGHVL

SEQ ID NO: 152291 - protein, 9 aa, Homo Sapiens
KICDQWDAL

SEQ ID NO: 152292 - protein, 9 aa, Homo Sapiens
KICDVGVSL

SEQ ID NO: 152293 - protein, 9 aa, Homo Sapiens
KICEVDLVI

SEQ ID NO: 152294 - protein, 9 aa, Homo Sapiens
KIDRLILEL

SEQ ID NO: 152295 - protein, 9 aa, Homo Sapiens
KIIDIFTTL

SEQ ID NO: 152296 - protein, 9 aa, Homo Sapiens
KIIESEEEL

SEQ ID NO: 152297 - protein, 9 aa, Homo Sapiens
KILDTFEKL

SEQ ID NO: 152298 - protein, 9 aa, Homo Sapiens
KILNDDTAL

SEQ ID NO: 152299 - protein, 9 aa, Homo Sapiens
KITECLSEL

SEQ ID NO: 152300 - protein, 9 aa, Homo Sapiens
KITEDFRAL

SEQ ID NO: 152301 - protein, 9 aa, Homo Sapiens
KLCDVTLKI

SEQ ID NO: 152302 - protein, 9 aa, Homo Sapiens
KPANVFITA

SEQ ID NO: 152303 - protein, 9 aa, Homo Sapiens
KPFKEFVEA

SEQ ID NO: 152304 - protein, 9 aa, Homo Sapiens
KPKEPQPEV

SEQ ID NO: 152305 - protein, 9 aa, Homo Sapiens
KPKPIGKLA

SEQ ID NO: 152306 - protein, 9 aa, Homo Sapiens
KPMKSVLVV

SEQ ID NO: 152307 - protein, 9 aa, Homo Sapiens
KQFVQWDEL

SEQ ID NO: 152308 - protein, 9 aa, Homo Sapiens
KQWLMTEAL

SEQ ID NO: 152309 - protein, 9 aa, Homo Sapiens
KSCDLLLFL

SEQ ID NO: 152310 - protein, 9 aa, Homo Sapiens
KSDPSIVRL

SEQ ID NO: 152311 - protein, 9 aa, Homo Sapiens
KSEGNHPAL

SEQ ID NO: 152312 - protein, 9 aa, Homo Sapiens
KSNTLPISL

SEQ ID NO: 152313 - protein, 9 aa, Homo Sapiens
KSYDDAESL

SEQ ID NO: 152314 - protein, 9 aa, Homo Sapiens
KTDEMHTAL

SEQ ID NO: 152315 - protein, 9 aa, Homo Sapiens
KTPDFILQV

SEQ ID NO: 152316 - protein, 9 aa, Homo Sapiens
KTTTPGPSL

SEQ ID NO: 152317 - protein, 9 aa, Homo Sapiens
KTVDNFVAL

SEQ ID NO: 152318 - protein, 9 aa, Homo Sapiens
KVADLVLML

SEQ ID NO: 152319 - protein, 9 aa, Homo Sapiens
KVDEAVAVL

SEQ ID NO: 152320 - protein, 9 aa, Homo Sapiens
KVVDPDHPL

SEQ ID NO: 152321 - protein, 9 aa, Homo Sapiens
LAAARLAAA

SEQ ID NO: 152322 - protein, 9 aa, Homo Sapiens
LAADCAHEL

SEQ ID NO: 152323 - protein, 9 aa, Homo Sapiens
LAADIHQAL

SEQ ID NO: 152324 - protein, 9 aa, Homo Sapiens
LAAGPSAAA

SEQ ID NO: 152325 - protein, 9 aa, Homo Sapiens
LAAHIPLFL

SEQ ID NO: 152326 - protein, 9 aa, Homo Sapiens
LAAPVISVL

SEQ ID NO: 152327 - protein, 9 aa, Homo Sapiens
LAASVFTCL

SEQ ID NO: 152328 - protein, 9 aa, Homo Sapiens
LAATPHSLP

SEQ ID NO: 152329 - protein, 9 aa, Homo Sapiens
LADDSVRSL

SEQ ID NO: 152330 - protein, 9 aa, Homo Sapiens
LADEAFFSV

SEQ ID NO: 152331 - protein, 9 aa, Homo Sapiens
LADETLLKV

SEQ ID NO: 152332 - protein, 9 aa, Homo Sapiens
LADGLKVVL

SEQ ID NO: 152333 - protein, 9 aa, Homo Sapiens
LADGSIAVL

SEQ ID NO: 152334 - protein, 9 aa, Homo Sapiens
LADGVPVAL

SEQ ID NO: 152335 - protein, 9 aa, Homo Sapiens
LADHTVHVL

SEQ ID NO: 152336 - protein, 9 aa, Homo Sapiens
LADPGIITI

SEQ ID NO: 152337 - protein, 9 aa, Homo Sapiens
LADPHAQLL

SEQ ID NO: 152338 - protein, 9 aa, Homo Sapiens
LADRNVTVL

SEQ ID NO: 152339 - protein, 9 aa, Homo Sapiens
LADVIIHEI

SEQ ID NO: 152340 - protein, 9 aa, Homo Sapiens
LADVTHLLL

SEQ ID NO: 152341 - protein, 9 aa, Homo Sapiens
LAFPGEMLL

SEQ ID NO: 152342 - protein, 9 aa, Homo Sapiens
LAFSRALEL

SEQ ID NO: 152343 - protein, 9 aa, Homo Sapiens
LAIDAIHQL

SEQ ID NO: 152344 - protein, 9 aa, Homo Sapiens
LAIDTEERL

SEQ ID NO: 152345 - protein, 9 aa, Homo Sapiens
LAIESANEL

SEQ ID NO: 152346 - protein, 9 aa, Homo Sapiens
LAIGPCKSL

SEQ ID NO: 152347 - protein, 9 aa, Homo Sapiens
LAIHGMETL

SEQ ID NO: 152348 - protein, 9 aa, Homo Sapiens
LAIVPVNTL

SEQ ID NO: 152349 - protein, 9 aa, Homo Sapiens
LALAIAQEL

SEQ ID NO: 152350 - protein, 9 aa, Homo Sapiens
LALFPGVAL

SEQ ID NO: 152351 - protein, 9 aa, Homo Sapiens
LAMEPTPEL

SEQ ID NO: 152352 - protein, 9 aa, Homo Sapiens
LAMRPLASL

SEQ ID NO: 152353 - protein, 9 aa, Homo Sapiens
LANIIYYSL

SEQ ID NO: 152354 - protein, 9 aa, Homo Sapiens
LAQAMETAL

SEQ ID NO: 152355 - protein, 9 aa, Homo Sapiens
LASEIYDIL

SEQ ID NO: 152356 - protein, 9 aa, Homo Sapiens
LASEPQEVL

SEQ ID NO: 152357 - protein, 9 aa, Homo Sapiens
LASPVSPEL

SEQ ID NO: 152358 - protein, 9 aa, Homo Sapiens
LATDVQTVA

SEQ ID NO: 152359 - protein, 9 aa, Homo Sapiens
LATRAIPEL

SEQ ID NO: 152360 - protein, 9 aa, Homo Sapiens
LAVDKSASL

SEQ ID NO: 152361 - protein, 9 aa, Homo Sapiens
LAVDPNRAV

SEQ ID NO: 152362 - protein, 9 aa, Homo Sapiens
LAVPDMSSL

SEQ ID NO: 152363 - protein, 9 aa, Homo Sapiens
LAVRDVSEL

SEQ ID NO: 152364 - protein, 9 aa, Homo Sapiens
LAVTDTGAL

SEQ ID NO: 152365 - protein, 9 aa, Homo Sapiens
LAWLDEHTL

SEQ ID NO: 152366 - protein, 9 aa, Homo Sapiens
LAYCQSEEL

SEQ ID NO: 152367 - protein, 9 aa, Homo Sapiens
LAYHLAVVL

SEQ ID NO: 152368 - protein, 9 aa, Homo Sapiens
LAYLQRIAL

SEQ ID NO: 152369 - protein, 9 aa, Homo Sapiens
LGFERFHAL

SEQ ID NO: 152370 - protein, 9 aa, Homo Sapiens
LIDDLQHCL

SEQ ID NO: 152371 - protein, 9 aa, Homo Sapiens
LIKPESKVA

SEQ ID NO: 152372 - protein, 9 aa, Homo Sapiens
LIVEPSREL

SEQ ID NO: 152373 - protein, 9 aa, Homo Sapiens
LLCNLDIIL

SEQ ID NO: 152374 - protein, 9 aa, Homo Sapiens
LLPPRAATL

SEQ ID NO: 152375 - protein, 9 aa, Homo Sapiens
LLSDTKLEL

SEQ ID NO: 152376 - protein, 9 aa, Homo Sapiens
LLSDVRFVL

SEQ ID NO: 152377 - protein, 9 aa, Homo Sapiens
LMQLLQESL

SEQ ID NO: 152378 - protein, 9 aa, Homo Sapiens
LPASETPKA

SEQ ID NO: 152379 - protein, 9 aa, Homo Sapiens
LPKPPGRGV

SEQ ID NO: 152380 - protein, 9 aa, Homo Sapiens
LPLSLLKTA

SEQ ID NO: 152381 - protein, 9 aa, Homo Sapiens
LPRKPVAGA

SEQ ID NO: 152382 - protein, 9 aa, Homo Sapiens
LPWQGLKAA

SEQ ID NO: 152383 - protein, 9 aa, Homo Sapiens
LSAPLIGAL

SEQ ID NO: 152384 - protein, 9 aa, Homo Sapiens
LSDDHVLIL

SEQ ID NO: 152385 - protein, 9 aa, Homo Sapiens
LSDETLLEI

SEQ ID NO: 152386 - protein, 9 aa, Homo Sapiens
LSDPQVHTV

SEQ ID NO: 152387 - protein, 9 aa, Homo Sapiens
LSHLLAIGL

SEQ ID NO: 152388 - protein, 9 aa, Homo Sapiens
LSHLQQDSL

SEQ ID NO: 152389 - protein, 9 aa, Homo Sapiens
LSHSLLVTL

SEQ ID NO: 152390 - protein, 9 aa, Homo Sapiens
LSLFIDDKL

SEQ ID NO: 152391 - protein, 9 aa, Homo Sapiens
LSSPPTESL

SEQ ID NO: 152392 - protein, 9 aa, Homo Sapiens
LSYLEKEAL

SEQ ID NO: 152393 - protein, 9 aa, Homo Sapiens
LTDANIHEL

SEQ ID NO: 152394 - protein, 9 aa, Homo Sapiens
LTDDTLQEL

SEQ ID NO: 152395 - protein, 9 aa, Homo Sapiens
LTDGHPLTL

SEQ ID NO: 152396 - protein, 9 aa, Homo Sapiens
LTDQTLIYL

SEQ ID NO: 152397 - protein, 9 aa, Homo Sapiens
LTTEVHPEL

SEQ ID NO: 152398 - protein, 9 aa, Homo Sapiens
LTVEPGASL

SEQ ID NO: 152399 - protein, 9 aa, Homo Sapiens
LVAPPLPAA

SEQ ID NO: 152400 - protein, 9 aa, Homo Sapiens
LVDDHFVEL

SEQ ID NO: 152401 - protein, 9 aa, Homo Sapiens
LVDDNYFYL

SEQ ID NO: 152402 - protein, 9 aa, Homo Sapiens
LVDENFTEL

SEQ ID NO: 152403 - protein, 9 aa, Homo Sapiens
LVDGQIFCL

SEQ ID NO: 152404 - protein, 9 aa, Homo Sapiens
MAAEPYETI

SEQ ID NO: 152405 - protein, 9 aa, Homo Sapiens
MAAPVDLEL

SEQ ID NO: 152406 - protein, 9 aa, Homo Sapiens
MACDTFIKI

SEQ ID NO: 152407 - protein, 9 aa, Homo Sapiens
MADGNQAQL

SEQ ID NO: 152408 - protein, 9 aa, Homo Sapiens
MADKCSPTL

SEQ ID NO: 152409 - protein, 9 aa, Homo Sapiens
MADPEVQQI

SEQ ID NO: 152410 - protein, 9 aa, Homo Sapiens
MADSGHYCV

SEQ ID NO: 152411 - protein, 9 aa, Homo Sapiens
MAFHQEHEV

SEQ ID NO: 152412 - protein, 9 aa, Homo Sapiens
MAHADPTEL

SEQ ID NO: 152413 - protein, 9 aa, Homo Sapiens
MAHGLFHEL

SEQ ID NO: 152414 - protein, 9 aa, Homo Sapiens
MAHSLATTL

SEQ ID NO: 152415 - protein, 9 aa, Homo Sapiens
MAIADEVEI

SEQ ID NO: 152416 - protein, 9 aa, Homo Sapiens
MAVIDGNVM

SEQ ID NO: 152417 - protein, 9 aa, Homo Sapiens
MAVQPKETL

SEQ ID NO: 152418 - protein, 9 aa, Homo Sapiens
MIDDTYQCL

SEQ ID NO: 152419 - protein, 9 aa, Homo Sapiens
MIIENFEAL

SEQ ID NO: 152420 - protein, 9 aa, Homo Sapiens
MQAPLLIAL

SEQ ID NO: 152421 - protein, 9 aa, Homo Sapiens
MSADVPLVV

SEQ ID NO: 152422 - protein, 9 aa, Homo Sapiens
MSCLLEVAL

SEQ ID NO: 152423 - protein, 9 aa, Homo Sapiens
MSHLLEMCV

SEQ ID NO: 152424 - protein, 9 aa, Homo Sapiens
MSSDVFPLL

SEQ ID NO: 152425 - protein, 9 aa, Homo Sapiens
MSVQPTVSL

SEQ ID NO: 152426 - protein, 9 aa, Homo Sapiens
MTCLSHPLQ

SEQ ID NO: 152427 - protein, 9 aa, Homo Sapiens
MTDGAQQAL

SEQ ID NO: 152428 - protein, 9 aa, Homo Sapiens
MVDGTLLLL

SEQ ID NO: 152429 - protein, 9 aa, Homo Sapiens
MVVDIVQEL

SEQ ID NO: 152430 - protein, 9 aa, Homo Sapiens
NAAAIYDLL

SEQ ID NO: 152431 - protein, 9 aa, Homo Sapiens
NAAGVMHYL

SEQ ID NO: 152432 - protein, 9 aa, Homo Sapiens
NAAMVFEFL

SEQ ID NO: 152433 - protein, 9 aa, Homo Sapiens
NAANIFERL

SEQ ID NO: 152434 - protein, 9 aa, Homo Sapiens
NACGLYHKM

SEQ ID NO: 152435 - protein, 9 aa, Homo Sapiens
NACGLYYKL

SEQ ID NO: 152436 - protein, 9 aa, Homo Sapiens
NADAIVVKL

SEQ ID NO: 152437 - protein, 9 aa, Homo Sapiens
NADETPICL

SEQ ID NO: 152438 - protein, 9 aa, Homo Sapiens
NADHTTLLL

SEQ ID NO: 152439 - protein, 9 aa, Homo Sapiens
NADPASHEI

SEQ ID NO: 152440 - protein, 9 aa, Homo Sapiens
NADPQAVTM

SEQ ID NO: 152441 - protein, 9 aa, Homo Sapiens
NADSQFWSL

SEQ ID NO: 152442 - protein, 9 aa, Homo Sapiens
NADSSNTAL

SEQ ID NO: 152443 - protein, 9 aa, Homo Sapiens
NADSSVQLL

SEQ ID NO: 152444 - protein, 9 aa, Homo Sapiens
NAENIFHSM

SEQ ID NO: 152445 - protein, 9 aa, Homo Sapiens
NAEPEPRSL

SEQ ID NO: 152446 - protein, 9 aa, Homo Sapiens
NAFDIAEEL

SEQ ID NO: 152447 - protein, 9 aa, Homo Sapiens
NAFSGVMML

SEQ ID NO: 152448 - protein, 9 aa, Homo Sapiens
NAIDDGCVV

SEQ ID NO: 152449 - protein, 9 aa, Homo Sapiens
NAIDKLFVL

SEQ ID NO: 152450 - protein, 9 aa, Homo Sapiens
NAIEGGTQL

SEQ ID NO: 152451 - protein, 9 aa, Homo Sapiens
NAIGPLVAL

SEQ ID NO: 152452 - protein, 9 aa, Homo Sapiens
NAILVDTPL

SEQ ID NO: 152453 - protein, 9 aa, Homo Sapiens
NAINITSAL

SEQ ID NO: 152454 - protein, 9 aa, Homo Sapiens
NAIREVLEL

SEQ ID NO: 152455 - protein, 9 aa, Homo Sapiens
NAISIHHAL

SEQ ID NO: 152456 - protein, 9 aa, Homo Sapiens
NALDLNSVL

SEQ ID NO: 152457 - protein, 9 aa, Homo Sapiens
NALGVILQV

SEQ ID NO: 152458 - protein, 9 aa, Homo Sapiens
NAMEDAQTL

SEQ ID NO: 152459 - protein, 9 aa, Homo Sapiens
NASEDRLEL

SEQ ID NO: 152460 - protein, 9 aa, Homo Sapiens
NASESKLEL

SEQ ID NO: 152461 - protein, 9 aa, Homo Sapiens
NASPVISSV

SEQ ID NO: 152462 - protein, 9 aa, Homo Sapiens
NATHQHCVL

SEQ ID NO: 152463 - protein, 9 aa, Homo Sapiens
NATWVRAEL

SEQ ID NO: 152464 - protein, 9 aa, Homo Sapiens
NAVAAAHSV

SEQ ID NO: 152465 - protein, 9 aa, Homo Sapiens
NAVAALSEI

SEQ ID NO: 152466 - protein, 9 aa, Homo Sapiens
NAVDPDVSA

SEQ ID NO: 152467 - protein, 9 aa, Homo Sapiens
NAVFTFEQL

SEQ ID NO: 152468 - protein, 9 aa, Homo Sapiens
NAVGDGIVL

SEQ ID NO: 152469 - protein, 9 aa, Homo Sapiens
NAVPLFLRL

SEQ ID NO: 152470 - protein, 9 aa, Homo Sapiens
NAVSGQESL

SEQ ID NO: 152471 - protein, 9 aa, Homo Sapiens
NAYDEHQTL

SEQ ID NO: 152472 - protein, 9 aa, Homo Sapiens
NITSSTCEL

SEQ ID NO: 152473 - protein, 9 aa, Homo Sapiens
NIVKVFEIL

SEQ ID NO: 152474 - protein, 9 aa, Homo Sapiens
NSAPAGETL

SEQ ID NO: 152475 - protein, 9 aa, Homo Sapiens
NSDPYSVAL

SEQ ID NO: 152476 - protein, 9 aa, Homo Sapiens
NSFTLDADF

SEQ ID NO: 152477 - protein, 9 aa, Homo Sapiens
NSHCFPAFL

SEQ ID NO: 152478 - protein, 9 aa, Homo Sapiens
NSHVIQEYL

SEQ ID NO: 152479 - protein, 9 aa, Homo Sapiens
NSHWDPVSL

SEQ ID NO: 152480 - protein, 9 aa, Homo Sapiens
NSSPVINHL

SEQ ID NO: 152481 - protein, 9 aa, Homo Sapiens
NSTGVLLEV

SEQ ID NO: 152482 - protein, 9 aa, Homo Sapiens
NSVEPAQPL

SEQ ID NO: 152483 - protein, 9 aa, Homo Sapiens
NTATIFHEL

SEQ ID NO: 152484 - protein, 9 aa, Homo Sapiens
NTIDPSHPM

SEQ ID NO: 152485 - protein, 9 aa, Homo Sapiens
NTIETFNEL

SEQ ID NO: 152486 - protein, 9 aa, Homo Sapiens
NVDGHLYEL

SEQ ID NO: 152487 - protein, 9 aa, Homo Sapiens
NVDPDNVVL

SEQ ID NO: 152488 - protein, 9 aa, Homo Sapiens
NVDPDSVVL

SEQ ID NO: 152489 - protein, 9 aa, Homo Sapiens
NVLDHFSEL

SEQ ID NO: 152490 - protein, 9 aa, Homo Sapiens
NVVDVFHAV

SEQ ID NO: 152491 - protein, 9 aa, Homo Sapiens
NVVEALIAL

SEQ ID NO: 152492 - protein, 9 aa, Homo Sapiens
PASPAISVV

SEQ ID NO: 152493 - protein, 9 aa, Homo Sapiens
PIRLLAAAA

SEQ ID NO: 152494 - protein, 9 aa, Homo Sapiens
QAADSILVL

SEQ ID NO: 152495 - protein, 9 aa, Homo Sapiens
QACGITAVL

SEQ ID NO: 152496 - protein, 9 aa, Homo Sapiens
QADAPNPSL

SEQ ID NO: 152497 - protein, 9 aa, Homo Sapiens
QADARQVVL

SEQ ID NO: 152498 - protein, 9 aa, Homo Sapiens
QADCAVLIV

SEQ ID NO: 152499 - protein, 9 aa, Homo Sapiens
QADEVIAIL

SEQ ID NO: 152500 - protein, 9 aa, Homo Sapiens
QADNPHVAL

SEQ ID NO: 152501 - protein, 9 aa, Homo Sapiens
QADPSAPCL

SEQ ID NO: 152502 - protein, 9 aa, Homo Sapiens
QADPTKLEL

SEQ ID NO: 152503 - protein, 9 aa, Homo Sapiens
QADQTFISL

SEQ ID NO: 152504 - protein, 9 aa, Homo Sapiens
QADTTRLEL

SEQ ID NO: 152505 - protein, 9 aa, Homo Sapiens
QAFGIMNEL

SEQ ID NO: 152506 - protein, 9 aa, Homo Sapiens
QAFIGEEVL

SEQ ID NO: 152507 - protein, 9 aa, Homo Sapiens
QAIENAHVL

SEQ ID NO: 152508 - protein, 9 aa, Homo Sapiens
QAIPVTSEL

SEQ ID NO: 152509 - protein, 9 aa, Homo Sapiens
QALEQFHQL

SEQ ID NO: 152510 - protein, 9 aa, Homo Sapiens
QALLDLHAL

SEQ ID NO: 152511 - protein, 9 aa, Homo Sapiens
QIPEIKQTL

SEQ ID NO: 152512 - protein, 9 aa, Homo Sapiens
RAADVLVYL

SEQ ID NO: 152513 - protein, 9 aa, Homo Sapiens
RAAELFHQL

SEQ ID NO: 152514 - protein, 9 aa, Homo Sapiens
RAAEPLLTL

SEQ ID NO: 152515 - protein, 9 aa, Homo Sapiens
RAASPIITL

SEQ ID NO: 152516 - protein, 9 aa, Homo Sapiens
RACPATQAL

SEQ ID NO: 152517 - protein, 9 aa, Homo Sapiens
RADDTFEAL

SEQ ID NO: 152518 - protein, 9 aa, Homo Sapiens
RADESTYVL

SEQ ID NO: 152519 - protein, 9 aa, Homo Sapiens
RADPESPIL

SEQ ID NO: 152520 - protein, 9 aa, Homo Sapiens
RAFGIPIRV

SEQ ID NO: 152521 - protein, 9 aa, Homo Sapiens
RAFSDRSSL

SEQ ID NO: 152522 - protein, 9 aa, Homo Sapiens
RAHDDPVAL

SEQ ID NO: 152523 - protein, 9 aa, Homo Sapiens
RAHSEPLAL

SEQ ID NO: 152524 - protein, 9 aa, Homo Sapiens
RAIEIYTDM

SEQ ID NO: 152525 - protein, 9 aa, Homo Sapiens
RAIENIDTL

SEQ ID NO: 152526 - protein, 9 aa, Homo Sapiens
RALDHYLTL

SEQ ID NO: 152527 - protein, 9 aa, Homo Sapiens
RALDVNVAL

SEQ ID NO: 152528 - protein, 9 aa, Homo Sapiens
RALEDRHSL

SEQ ID NO: 152529 - protein, 9 aa, Homo Sapiens
RALEHFTDL

SEQ ID NO: 152530 - protein, 9 aa, Homo Sapiens
RALGFSEEL

SEQ ID NO: 152531 - protein, 9 aa, Homo Sapiens
RALHQGDSL

SEQ ID NO: 152532 - protein, 9 aa, Homo Sapiens
RALLDRDAL

SEQ ID NO: 152533 - protein, 9 aa, Homo Sapiens
RALYDFEAL

SEQ ID NO: 152534 - protein, 9 aa, Homo Sapiens
RAMYLPDTL

SEQ ID NO: 152535 - protein, 9 aa, Homo Sapiens
RAQDPSEVL

SEQ ID NO: 152536 - protein, 9 aa, Homo Sapiens
RAQLQQVEL

SEQ ID NO: 152537 - protein, 9 aa, Homo Sapiens
RASFIFISV

SEQ ID NO: 152538 - protein, 9 aa, Homo Sapiens
RASSIYSKL

SEQ ID NO: 152539 - protein, 9 aa, Homo Sapiens
RAVAPTMSL

SEQ ID NO: 152540 - protein, 9 aa, Homo Sapiens
RAVEVSAEL

SEQ ID NO: 152541 - protein, 9 aa, Homo Sapiens
RAVQDVESL

SEQ ID NO: 152542 - protein, 9 aa, Homo Sapiens
RAVSETESL

SEQ ID NO: 152543 - protein, 9 aa, Homo Sapiens
RAYDGTTYL

SEQ ID NO: 152544 - protein, 9 aa, Homo Sapiens
RAYNHLDEL

SEQ ID NO: 152545 - protein, 9 aa, Homo Sapiens
RGDETFAVL

SEQ ID NO: 152546 - protein, 9 aa, Homo Sapiens
RICPIDITL

SEQ ID NO: 152547 - protein, 9 aa, Homo Sapiens
RIDDLQMVL

SEQ ID NO: 152548 - protein, 9 aa, Homo Sapiens
RIPSFVTEL

SEQ ID NO: 152549 - protein, 9 aa, Homo Sapiens
RIVDPEIAL

SEQ ID NO: 152550 - protein, 9 aa, Homo Sapiens
RPAPVAVAA

SEQ ID NO: 152551 - protein, 9 aa, Homo Sapiens
RPFHGISTV

SEQ ID NO: 152552 - protein, 9 aa, Homo Sapiens
RPLLKAITA

SEQ ID NO: 152553 - protein, 9 aa, Homo Sapiens
RPNDIMAEV

SEQ ID NO: 152554 - protein, 9 aa, Homo Sapiens
RPRPGTGLG

SEQ ID NO: 152555 - protein, 9 aa, Homo Sapiens
RPSPAPPAA

SEQ ID NO: 152556 - protein, 9 aa, Homo Sapiens
RPSPPVQSV

SEQ ID NO: 152557 - protein, 9 aa, Homo Sapiens
RPVLPRTEA

SEQ ID NO: 152558 - protein, 9 aa, Homo Sapiens
RPYDKNISP

SEQ ID NO: 152559 - protein, 9 aa, Homo Sapiens
RQALLLLAL

SEQ ID NO: 152560 - protein, 9 aa, Homo Sapiens
RQAPPHIEL

SEQ ID NO: 152561 - protein, 9 aa, Homo Sapiens
RSAEPAEAL

SEQ ID NO: 152562 - protein, 9 aa, Homo Sapiens
RSAEVTLEV

SEQ ID NO: 152563 - protein, 9 aa, Homo Sapiens
RSDCTYIVL

SEQ ID NO: 152564 - protein, 9 aa, Homo Sapiens
RSHYSPIYL

SEQ ID NO: 152565 - protein, 9 aa, Homo Sapiens
RSIGEYDVL

SEQ ID NO: 152566 - protein, 9 aa, Homo Sapiens
RSIHIFDTL

SEQ ID NO: 152567 - protein, 9 aa, Homo Sapiens
RTDDNCIVL

SEQ ID NO: 152568 - protein, 9 aa, Homo Sapiens
RTDDTPVVL

SEQ ID NO: 152569 - protein, 9 aa, Homo Sapiens
RTLDCIHVL

SEQ ID NO: 152570 - protein, 9 aa, Homo Sapiens
RTVDLFPVL

SEQ ID NO: 152571 - protein, 9 aa, Homo Sapiens
RVCEVDNEL

SEQ ID NO: 152572 - protein, 9 aa, Homo Sapiens
RVCEVEFVF

SEQ ID NO: 152573 - protein, 9 aa, Homo Sapiens
RVFLDHNAL

SEQ ID NO: 152574 - protein, 9 aa, Homo Sapiens
RVMELFFTV

SEQ ID NO: 152575 - protein, 9 aa, Homo Sapiens
RVYEFLDKL

SEQ ID NO: 152576 - protein, 9 aa, Homo Sapiens
SAACPGLQL

SEQ ID NO: 152577 - protein, 9 aa, Homo Sapiens
SAAEAYQVL

SEQ ID NO: 152578 - protein, 9 aa, Homo Sapiens
SAAEIMAVL

SEQ ID NO: 152579 - protein, 9 aa, Homo Sapiens
SAAELDLVL

SEQ ID NO: 152580 - protein, 9 aa, Homo Sapiens
SAAENFLVL

SEQ ID NO: 152581 - protein, 9 aa, Homo Sapiens
SAAEPPTAL

SEQ ID NO: 152582 - protein, 9 aa, Homo Sapiens
SAAEPTPAV

SEQ ID NO: 152583 - protein, 9 aa, Homo Sapiens
SAAEPVPAA

SEQ ID NO: 152584 - protein, 9 aa, Homo Sapiens
SAAFPGASL

SEQ ID NO: 152585 - protein, 9 aa, Homo Sapiens
SAAGAECEL

SEQ ID NO: 152586 - protein, 9 aa, Homo Sapiens
SAAGLKLYL

SEQ ID NO: 152587 - protein, 9 aa, Homo Sapiens
SAAGPGFSL

SEQ ID NO: 152588 - protein, 9 aa, Homo Sapiens
SAAHAIVSV

SEQ ID NO: 152589 - protein, 9 aa, Homo Sapiens
SAAMPGASL

SEQ ID NO: 152590 - protein, 9 aa, Homo Sapiens
SAAMVFSAL

SEQ ID NO: 152591 - protein, 9 aa, Homo Sapiens
SAAPGTASL

SEQ ID NO: 152592 - protein, 9 aa, Homo Sapiens
SAAPPEPAV

SEQ ID NO: 152593 - protein, 9 aa, Homo Sapiens
SAAPPGLEA

SEQ ID NO: 152594 - protein, 9 aa, Homo Sapiens
SAAPPLPSL

SEQ ID NO: 152595 - protein, 9 aa, Homo Sapiens
SAAQPGVAF

SEQ ID NO: 152596 - protein, 9 aa, Homo Sapiens
SAASPAVAL

SEQ ID NO: 152597 - protein, 9 aa, Homo Sapiens
SACDGIFHL

SEQ ID NO: 152598 - protein, 9 aa, Homo Sapiens
SACFTLQEL

SEQ ID NO: 152599 - protein, 9 aa, Homo Sapiens
SACGHTAVL

SEQ ID NO: 152600 - protein, 9 aa, Homo Sapiens
SACHLLVSL

SEQ ID NO: 152601 - protein, 9 aa, Homo Sapiens
SACHVSNTL

SEQ ID NO: 152602 - protein, 9 aa, Homo Sapiens
SACPLLLTL

SEQ ID NO: 152603 - protein, 9 aa, Homo Sapiens
SADACHAEL

SEQ ID NO: 152604 - protein, 9 aa, Homo Sapiens
SADATPLHV

SEQ ID NO: 152605 - protein, 9 aa, Homo Sapiens
SADENYRPL

SEQ ID NO: 152606 - protein, 9 aa, Homo Sapiens
SADGMRLAL

SEQ ID NO: 152607 - protein, 9 aa, Homo Sapiens
SADHLAHEV

SEQ ID NO: 152608 - protein, 9 aa, Homo Sapiens
SADKFQVLL

SEQ ID NO: 152609 - protein, 9 aa, Homo Sapiens
SADMSHVAL

SEQ ID NO: 152610 - protein, 9 aa, Homo Sapiens
SADNVRQQL

SEQ ID NO: 152611 - protein, 9 aa, Homo Sapiens
SADPEVMLL

SEQ ID NO: 152612 - protein, 9 aa, Homo Sapiens
SADPGILVL

SEQ ID NO: 152613 - protein, 9 aa, Homo Sapiens
SADPNVVDL

SEQ ID NO: 152614 - protein, 9 aa, Homo Sapiens
SADPRPLAV

SEQ ID NO: 152615 - protein, 9 aa, Homo Sapiens
SADQSPSAL

SEQ ID NO: 152616 - protein, 9 aa, Homo Sapiens
SADSLEHVL

SEQ ID NO: 152617 - protein, 9 aa, Homo Sapiens
SAEHSHPAL

SEQ ID NO: 152618 - protein, 9 aa, Homo Sapiens
SAETPTIPL

SEQ ID NO: 152619 - protein, 9 aa, Homo Sapiens
SAFDHFASV

SEQ ID NO: 152620 - protein, 9 aa, Homo Sapiens
SAFFDSTTL

SEQ ID NO: 152621 - protein, 9 aa, Homo Sapiens
SAFGYFITA

SEQ ID NO: 152622 - protein, 9 aa, Homo Sapiens
SAFPFPVTV

SEQ ID NO: 152623 - protein, 9 aa, Homo Sapiens
SAFSSWEEL

SEQ ID NO: 152624 - protein, 9 aa, Homo Sapiens
SAFYDVDFL

SEQ ID NO: 152625 - protein, 9 aa, Homo Sapiens
SAGPPLLAV

SEQ ID NO: 152626 - protein, 9 aa, Homo Sapiens
SAGPVGDDL

SEQ ID NO: 152627 - protein, 9 aa, Homo Sapiens
SAGPVGDDM

SEQ ID NO: 152628 - protein, 9 aa, Homo Sapiens
SAHIMGEAM

SEQ ID NO: 152629 - protein, 9 aa, Homo Sapiens
SAHLFEVEL

SEQ ID NO: 152630 - protein, 9 aa, Homo Sapiens
SAHSHFISL

SEQ ID NO: 152631 - protein, 9 aa, Homo Sapiens
SAIDTREEL

SEQ ID NO: 152632 - protein, 9 aa, Homo Sapiens
SAIFNFQSL

SEQ ID NO: 152633 - protein, 9 aa, Homo Sapiens
SAIFPDVAL

SEQ ID NO: 152634 - protein, 9 aa, Homo Sapiens
SAIGYIHSL

SEQ ID NO: 152635 - protein, 9 aa, Homo Sapiens
SAIHILDVL

SEQ ID NO: 152636 - protein, 9 aa, Homo Sapiens
SAINQVEAL

SEQ ID NO: 152637 - protein, 9 aa, Homo Sapiens
SAIPVTCLL

SEQ ID NO: 152638 - protein, 9 aa, Homo Sapiens
SALDSTPAL

SEQ ID NO: 152639 - protein, 9 aa, Homo Sapiens
SALEFLTQL

SEQ ID NO: 152640 - protein, 9 aa, Homo Sapiens
SALKAIHAL

SEQ ID NO: 152641 - protein, 9 aa, Homo Sapiens
SALQIFEKL

SEQ ID NO: 152642 - protein, 9 aa, Homo Sapiens
SAMEVVPAL

SEQ ID NO: 152643 - protein, 9 aa, Homo Sapiens
SANVVPEAL

SEQ ID NO: 152644 - protein, 9 aa, Homo Sapiens
SANYTEIAL

SEQ ID NO: 152645 - protein, 9 aa, Homo Sapiens
SASALAVAL

SEQ ID NO: 152646 - protein, 9 aa, Homo Sapiens
SASDWYDAL

SEQ ID NO: 152647 - protein, 9 aa, Homo Sapiens
SASESILEL

SEQ ID NO: 152648 - protein, 9 aa, Homo Sapiens
SASEVEVQL

SEQ ID NO: 152649 - protein, 9 aa, Homo Sapiens
SASEVPSEL

SEQ ID NO: 152650 - protein, 9 aa, Homo Sapiens
SASGPFESH

SEQ ID NO: 152651 - protein, 9 aa, Homo Sapiens
SASPPGPTL

SEQ ID NO: 152652 - protein, 9 aa, Homo Sapiens
SASPPPPAL

SEQ ID NO: 152653 - protein, 9 aa, Homo Sapiens
SASRVVQVV

SEQ ID NO: 152654 - protein, 9 aa, Homo Sapiens
SASSDFNTL

SEQ ID NO: 152655 - protein, 9 aa, Homo Sapiens
SATELMNIL

SEQ ID NO: 152656 - protein, 9 aa, Homo Sapiens
SATQVYTIL

SEQ ID NO: 152657 - protein, 9 aa, Homo Sapiens
SATRVYIVL

SEQ ID NO: 152658 - protein, 9 aa, Homo Sapiens
SATSVHTSV

SEQ ID NO: 152659 - protein, 9 aa, Homo Sapiens
SAVADKHEL

SEQ ID NO: 152660 - protein, 9 aa, Homo Sapiens
SAVDLPVTL

SEQ ID NO: 152661 - protein, 9 aa, Homo Sapiens
SAVDPVAVL

SEQ ID NO: 152662 - protein, 9 aa, Homo Sapiens
SAVDVHINM

SEQ ID NO: 152663 - protein, 9 aa, Homo Sapiens
SAVEPSDEI

SEQ ID NO: 152664 - protein, 9 aa, Homo Sapiens
SAVGQFVSL

SEQ ID NO: 152665 - protein, 9 aa, Homo Sapiens
SAVSHFFSL

SEQ ID NO: 152666 - protein, 9 aa, Homo Sapiens
SAVSIFHEL

SEQ ID NO: 152667 - protein, 9 aa, Homo Sapiens
SAVSPSESV

SEQ ID NO: 152668 - protein, 9 aa, Homo Sapiens
SAVTAFVTF

SEQ ID NO: 152669 - protein, 9 aa, Homo Sapiens
SAVTEEAAL

SEQ ID NO: 152670 - protein, 9 aa, Homo Sapiens
SAVTICDEL

SEQ ID NO: 152671 - protein, 9 aa, Homo Sapiens
SAVTTFEAL

SEQ ID NO: 152672 - protein, 9 aa, Homo Sapiens
SAVVDFEAL

SEQ ID NO: 152673 - protein, 9 aa, Homo Sapiens
SAYAGFLAL

SEQ ID NO: 152674 - protein, 9 aa, Homo Sapiens
SAYLQREEL

SEQ ID NO: 152675 - protein, 9 aa, Homo Sapiens
SGCPLFFPL

SEQ ID NO: 152676 - protein, 9 aa, Homo Sapiens
SGHLQNDTL

SEQ ID NO: 152677 - protein, 9 aa, Homo Sapiens
SGPGPAAAL

SEQ ID NO: 152678 - protein, 9 aa, Homo Sapiens
SIAGIFKEV

SEQ ID NO: 152679 - protein, 9 aa, Homo Sapiens
SICTTVLEL

SEQ ID NO: 152680 - protein, 9 aa, Homo Sapiens
SIEDICHVL

SEQ ID NO: 152681 - protein, 9 aa, Homo Sapiens
SIEPNFHSL

SEQ ID NO: 152682 - protein, 9 aa, Homo Sapiens
SIESIHSEM

SEQ ID NO: 152683 - protein, 9 aa, Homo Sapiens
SIIDDRVIL

SEQ ID NO: 152684 - protein, 9 aa, Homo Sapiens
SILSHFQSL

SEQ ID NO: 152685 - protein, 9 aa, Homo Sapiens
SIPEPIDPL

SEQ ID NO: 152686 - protein, 9 aa, Homo Sapiens
SISGITMVL

SEQ ID NO: 152687 - protein, 9 aa, Homo Sapiens
SIVDDEATL

SEQ ID NO: 152688 - protein, 9 aa, Homo Sapiens
SIVEPKDEI

SEQ ID NO: 152689 - protein, 9 aa, Homo Sapiens
SIWDGSEVL

SEQ ID NO: 152690 - protein, 9 aa, Homo Sapiens
SNHLLEDSL

SEQ ID NO: 152691 - protein, 9 aa, Homo Sapiens
SNHWQIPEL

SEQ ID NO: 152692 - protein, 9 aa, Homo Sapiens
SPADRQLVA

SEQ ID NO: 152693 - protein, 9 aa, Homo Sapiens
SPFGTITSA

SEQ ID NO: 152694 - protein, 9 aa, Homo Sapiens
SPFHFQPSA

SEQ ID NO: 152695 - protein, 9 aa, Homo Sapiens
SPHLGPAPA

SEQ ID NO: 152696 - protein, 9 aa, Homo Sapiens
SPHPSPLGA

SEQ ID NO: 152697 - protein, 9 aa, Homo Sapiens
SPHSQVLTA

SEQ ID NO: 152698 - protein, 9 aa, Homo Sapiens
SPIENIQRV

SEQ ID NO: 152699 - protein, 9 aa, Homo Sapiens
SPKQILDPA

SEQ ID NO: 152700 - protein, 9 aa, Homo Sapiens
SPLKHFVTA

SEQ ID NO: 152701 - protein, 9 aa, Homo Sapiens
SPLSAARAA

SEQ ID NO: 152702 - protein, 9 aa, Homo Sapiens
SPNRYWLCA

SEQ ID NO: 152703 - protein, 9 aa, Homo Sapiens
SPRVPNSSV

SEQ ID NO: 152704 - protein, 9 aa, Homo Sapiens
SPVTDFREA

SEQ ID NO: 152705 - protein, 9 aa, Homo Sapiens
SPYHNFDSV

SEQ ID NO: 152706 - protein, 9 aa, Homo Sapiens
SQDPGTHVV

SEQ ID NO: 152707 - protein, 9 aa, Homo Sapiens
SSAKPGPAL

SEQ ID NO: 152708 - protein, 9 aa, Homo Sapiens
SSAPPLSEL

SEQ ID NO: 152709 - protein, 9 aa, Homo Sapiens
SSDGHEFIV

SEQ ID NO: 152710 - protein, 9 aa, Homo Sapiens
SSDPKVLTL

SEQ ID NO: 152711 - protein, 9 aa, Homo Sapiens
SSHFLEQTL

SEQ ID NO: 152712 - protein, 9 aa, Homo Sapiens
SSHLLSLTL

SEQ ID NO: 152713 - protein, 9 aa, Homo Sapiens
SSHTLLQVL

SEQ ID NO: 152714 - protein, 9 aa, Homo Sapiens
SSHVQQQAL

SEQ ID NO: 152715 - protein, 9 aa, Homo Sapiens
SSHYLLCAL

SEQ ID NO: 152716 - protein, 9 aa, Homo Sapiens
SSNWQKEAM

SEQ ID NO: 152717 - protein, 9 aa, Homo Sapiens
SSPQAGSSL

SEQ ID NO: 152718 - protein, 9 aa, Homo Sapiens
STADVYCKL

SEQ ID NO: 152719 - protein, 9 aa, Homo Sapiens
STAGPSEAL

SEQ ID NO: 152720 - protein, 9 aa, Homo Sapiens
STCEAVMIL

SEQ ID NO: 152721 - protein, 9 aa, Homo Sapiens
STIGTYATL

SEQ ID NO: 152722 - protein, 9 aa, Homo Sapiens
STSAPGPAL

SEQ ID NO: 152723 - protein, 9 aa, Homo Sapiens
STYDGAETL

SEQ ID NO: 152724 - protein, 9 aa, Homo Sapiens
SVCDILLAL

SEQ ID NO: 152725 - protein, 9 aa, Homo Sapiens
SVCDYFFEA

SEQ ID NO: 152726 - protein, 9 aa, Homo Sapiens
SVDDTIVAL

SEQ ID NO: 152727 - protein, 9 aa, Homo Sapiens
SVDPTRLLL

SEQ ID NO: 152728 - protein, 9 aa, Homo Sapiens
SVDSHFCHL

SEQ ID NO: 152729 - protein, 9 aa, Homo Sapiens
SVDSHFQEV

SEQ ID NO: 152730 - protein, 9 aa, Homo Sapiens
SVIGHHETL

SEQ ID NO: 152731 - protein, 9 aa, Homo Sapiens
SVVDVFAQL

SEQ ID NO: 152732 - protein, 9 aa, Homo Sapiens
SVVKEMLEL

SEQ ID NO: 152733 - protein, 9 aa, Homo Sapiens
TAAAVNLLL

SEQ ID NO: 152734 - protein, 9 aa, Homo Sapiens
TAADDHQAL

SEQ ID NO: 152735 - protein, 9 aa, Homo Sapiens
TAAPPAQPL

SEQ ID NO: 152736 - protein, 9 aa, Homo Sapiens
TAAPTIGVL

SEQ ID NO: 152737 - protein, 9 aa, Homo Sapiens
TAAPTVCLL

SEQ ID NO: 152738 - protein, 9 aa, Homo Sapiens
TAAPVPTTL

SEQ ID NO: 152739 - protein, 9 aa, Homo Sapiens
TAAPVQETL

SEQ ID NO: 152740 - protein, 9 aa, Homo Sapiens
TAASPTIAL

SEQ ID NO: 152741 - protein, 9 aa, Homo Sapiens
TACDIQTHM

SEQ ID NO: 152742 - protein, 9 aa, Homo Sapiens
TADDFLVFL

SEQ ID NO: 152743 - protein, 9 aa, Homo Sapiens
TADDPSLSL

SEQ ID NO: 152744 - protein, 9 aa, Homo Sapiens
TADEVHYFL

SEQ ID NO: 152745 - protein, 9 aa, Homo Sapiens
TADGAHFEL

SEQ ID NO: 152746 - protein, 9 aa, Homo Sapiens
TADGDLYTL

SEQ ID NO: 152747 - protein, 9 aa, Homo Sapiens
TADGMVHLL

SEQ ID NO: 152748 - protein, 9 aa, Homo Sapiens
TADSYLLQL

SEQ ID NO: 152749 - protein, 9 aa, Homo Sapiens
TAHFEQNTL

SEQ ID NO: 152750 - protein, 9 aa, Homo Sapiens
TAHVMPSTL

SEQ ID NO: 152751 - protein, 9 aa, Homo Sapiens
TAHWLNTVL

SEQ ID NO: 152752 - protein, 9 aa, Homo Sapiens
TAIDDRCEL

SEQ ID NO: 152753 - protein, 9 aa, Homo Sapiens
TAIDVQVGL

SEQ ID NO: 152754 - protein, 9 aa, Homo Sapiens
TAIEAQHLL

SEQ ID NO: 152755 - protein, 9 aa, Homo Sapiens
TAIPVTQEL

SEQ ID NO: 152756 - protein, 9 aa, Homo Sapiens
TAISLFYEL

SEQ ID NO: 152757 - protein, 9 aa, Homo Sapiens
TALAIYHVI

SEQ ID NO: 152758 - protein, 9 aa, Homo Sapiens
TALNLFFKL

SEQ ID NO: 152759 - protein, 9 aa, Homo Sapiens
TALSFFHML

SEQ ID NO: 152760 - protein, 9 aa, Homo Sapiens
TAMDAQEAL

SEQ ID NO: 152761 - protein, 9 aa, Homo Sapiens
TAPQGNVDL

SEQ ID NO: 152762 - protein, 9 aa, Homo Sapiens
TAQILLKAL

SEQ ID NO: 152763 - protein, 9 aa, Homo Sapiens
TASEMILVL

SEQ ID NO: 152764 - protein, 9 aa, Homo Sapiens
TASEVLDSL

SEQ ID NO: 152765 - protein, 9 aa, Homo Sapiens
TASPVAVSL

SEQ ID NO: 152766 - protein, 9 aa, Homo Sapiens
TASPVIKAV

SEQ ID NO: 152767 - protein, 9 aa, Homo Sapiens
TASQVYETL

SEQ ID NO: 152768 - protein, 9 aa, Homo Sapiens
TAVAPNVAL

SEQ ID NO: 152769 - protein, 9 aa, Homo Sapiens
TAVAVFEIL

SEQ ID NO: 152770 - protein, 9 aa, Homo Sapiens
TAYDNFVEL

SEQ ID NO: 152771 - protein, 9 aa, Homo Sapiens
TAYLDGVSL

SEQ ID NO: 152772 - protein, 9 aa, Homo Sapiens
TIANPTDVL

SEQ ID NO: 152773 - protein, 9 aa, Homo Sapiens
TIDADAPEL

SEQ ID NO: 152774 - protein, 9 aa, Homo Sapiens
TIDPIPHQL

SEQ ID NO: 152775 - protein, 9 aa, Homo Sapiens
TIFKDHVSL

SEQ ID NO: 152776 - protein, 9 aa, Homo Sapiens
TIIDKSKSV

SEQ ID NO: 152777 - protein, 9 aa, Homo Sapiens
TIIEATHVL

SEQ ID NO: 152778 - protein, 9 aa, Homo Sapiens
TLCDVILMV

SEQ ID NO: 152779 - protein, 9 aa, Homo Sapiens
TNHLHQTPL

SEQ ID NO: 152780 - protein, 9 aa, Homo Sapiens
TPAHVLPSA

SEQ ID NO: 152781 - protein, 9 aa, Homo Sapiens
TPKPPGTGP

SEQ ID NO: 152782 - protein, 9 aa, Homo Sapiens
TPSAAALAA

SEQ ID NO: 152783 - protein, 9 aa, Homo Sapiens
TSAAIYHVL

SEQ ID NO: 152784 - protein, 9 aa, Homo Sapiens
TSAPITCEL

SEQ ID NO: 152785 - protein, 9 aa, Homo Sapiens
TSDPLELFL

SEQ ID NO: 152786 - protein, 9 aa, Homo Sapiens
TSNVITESL

SEQ ID NO: 152787 - protein, 9 aa, Homo Sapiens
TSVPPGSAL

SEQ ID NO: 152788 - protein, 9 aa, Homo Sapiens
TTDDSICVL

SEQ ID NO: 152789 - protein, 9 aa, Homo Sapiens
TTDGYLLRL

SEQ ID NO: 152790 - protein, 9 aa, Homo Sapiens
TTMVPTAAL

SEQ ID NO: 152791 - protein, 9 aa, Homo Sapiens
TTSPVLPSL

SEQ ID NO: 152792 - protein, 9 aa, Homo Sapiens
TVCHVVIVV

SEQ ID NO: 152793 - protein, 9 aa, Homo Sapiens
TVDGSPHEL

SEQ ID NO: 152794 - protein, 9 aa, Homo Sapiens
TVIDYFHQL

SEQ ID NO: 152795 - protein, 9 aa, Homo Sapiens
TVKGVSLSS

SEQ ID NO: 152796 - protein, 9 aa, Homo Sapiens
TVKPPTSVA

SEQ ID NO: 152797 - protein, 9 aa, Homo Sapiens
TVTTVILEV

SEQ ID NO: 152798 - protein, 9 aa, Homo Sapiens
TVYEGFISA

SEQ ID NO: 152799 - protein, 9 aa, Homo Sapiens
TVYGGSDEL

SEQ ID NO: 152800 - protein, 9 aa, Homo Sapiens
VAAAHSVVL

SEQ ID NO: 152801 - protein, 9 aa, Homo Sapiens
VAAAVDLII

SEQ ID NO: 152802 - protein, 9 aa, Homo Sapiens
VAAAVPVII

SEQ ID NO: 152803 - protein, 9 aa, Homo Sapiens
VAAAYADEL

SEQ ID NO: 152804 - protein, 9 aa, Homo Sapiens
VAADAVASL

SEQ ID NO: 152805 - protein, 9 aa, Homo Sapiens
VAAEAFSEL

SEQ ID NO: 152806 - protein, 9 aa, Homo Sapiens
VAAGVLCEL

SEQ ID NO: 152807 - protein, 9 aa, Homo Sapiens
VAAPASLSL

SEQ ID NO: 152808 - protein, 9 aa, Homo Sapiens
VAATVYCML

SEQ ID NO: 152809 - protein, 9 aa, Homo Sapiens
VAAYEFTTL

SEQ ID NO: 152810 - protein, 9 aa, Homo Sapiens
VACGAFHSL

SEQ ID NO: 152811 - protein, 9 aa, Homo Sapiens
VACGANHTL

SEQ ID NO: 152812 - protein, 9 aa, Homo Sapiens
VACGASHVL

SEQ ID NO: 152813 - protein, 9 aa, Homo Sapiens
VACGLNHTL

SEQ ID NO: 152814 - protein, 9 aa, Homo Sapiens
VACGSAHTL

SEQ ID NO: 152815 - protein, 9 aa, Homo Sapiens
VACGSYHSL

SEQ ID NO: 152816 - protein, 9 aa, Homo Sapiens
VACITEQVL

SEQ ID NO: 152817 - protein, 9 aa, Homo Sapiens
VACLDKNEL

SEQ ID NO: 152818 - protein, 9 aa, Homo Sapiens
VACPPMYHL

SEQ ID NO: 152819 - protein, 9 aa, Homo Sapiens
VACRAIGIL

SEQ ID NO: 152820 - protein, 9 aa, Homo Sapiens
VADDTPVLL

SEQ ID NO: 152821 - protein, 9 aa, Homo Sapiens
VADEGICYL

SEQ ID NO: 152822 - protein, 9 aa, Homo Sapiens
VADFQRYIL

SEQ ID NO: 152823 - protein, 9 aa, Homo Sapiens
VADGLITTL

SEQ ID NO: 152824 - protein, 9 aa, Homo Sapiens
VADGYPVRL

SEQ ID NO: 152825 - protein, 9 aa, Homo Sapiens
VADHPFLFL

SEQ ID NO: 152826 - protein, 9 aa, Homo Sapiens
VADKILWEI

SEQ ID NO: 152827 - protein, 9 aa, Homo Sapiens
VADNLAIQL

SEQ ID NO: 152828 - protein, 9 aa, Homo Sapiens
VADNRIQEL

SEQ ID NO: 152829 - protein, 9 aa, Homo Sapiens
VADPDNPLV

SEQ ID NO: 152830 - protein, 9 aa, Homo Sapiens
VADPETRTV

SEQ ID NO: 152831 - protein, 9 aa, Homo Sapiens
VADPIIYVL

SEQ ID NO: 152832 - protein, 9 aa, Homo Sapiens
VADPTPFHI

SEQ ID NO: 152833 - protein, 9 aa, Homo Sapiens
VADPVEAVL

SEQ ID NO: 152834 - protein, 9 aa, Homo Sapiens
VADPYVVIM

SEQ ID NO: 152835 - protein, 9 aa, Homo Sapiens
VADRLLVEL

SEQ ID NO: 152836 - protein, 9 aa, Homo Sapiens
VADRLMLEL

SEQ ID NO: 152837 - protein, 9 aa, Homo Sapiens
VADTVARVL

SEQ ID NO: 152838 - protein, 9 aa, Homo Sapiens
VADTVYRAL

SEQ ID NO: 152839 - protein, 9 aa, Homo Sapiens
VAEDKFITL

SEQ ID NO: 152840 - protein, 9 aa, Homo Sapiens
VAEERGAVL

SEQ ID NO: 152841 - protein, 9 aa, Homo Sapiens
VAEEVNAIL

SEQ ID NO: 152842 - protein, 9 aa, Homo Sapiens
VAEGGKAEL

SEQ ID NO: 152843 - protein, 9 aa, Homo Sapiens
VAEGPGAEL

SEQ ID NO: 152844 - protein, 9 aa, Homo Sapiens
VAEHHVATL

SEQ ID NO: 152845 - protein, 9 aa, Homo Sapiens
VAESGLPAL

SEQ ID NO: 152846 - protein, 9 aa, Homo Sapiens
VAFSPVTEL

SEQ ID NO: 152847 - protein, 9 aa, Homo Sapiens
VAGPALEAL

SEQ ID NO: 152848 - protein, 9 aa, Homo Sapiens
VAGPVGGSL

SEQ ID NO: 152849 - protein, 9 aa, Homo Sapiens
VAHSPPSTL

SEQ ID NO: 152850 - protein, 9 aa, Homo Sapiens
VAHTSLDAL

SEQ ID NO: 152851 - protein, 9 aa, Homo Sapiens
VAIKAGTTL

SEQ ID NO: 152852 - protein, 9 aa, Homo Sapiens
VAILDINRL

SEQ ID NO: 152853 - protein, 9 aa, Homo Sapiens
VAISECHTL

SEQ ID NO: 152854 - protein, 9 aa, Homo Sapiens
VAITEHTEV

SEQ ID NO: 152855 - protein, 9 aa, Homo Sapiens
VALAWLHVL

SEQ ID NO: 152856 - protein, 9 aa, Homo Sapiens
VALDFEQEM

SEQ ID NO: 152857 - protein, 9 aa, Homo Sapiens
VALHSAVSA

SEQ ID NO: 152858 - protein, 9 aa, Homo Sapiens
VALNSFDDL

SEQ ID NO: 152859 - protein, 9 aa, Homo Sapiens
VALPMVLVL

SEQ ID NO: 152860 - protein, 9 aa, Homo Sapiens
VALPPGLAV

SEQ ID NO: 152861 - protein, 9 aa, Homo Sapiens
VAMTGEITL

SEQ ID NO: 152862 - protein, 9 aa, Homo Sapiens
VANFQKTTL

SEQ ID NO: 152863 - protein, 9 aa, Homo Sapiens
VANTMRTSL

SEQ ID NO: 152864 - protein, 9 aa, Homo Sapiens
VANVSLLAL

SEQ ID NO: 152865 - protein, 9 aa, Homo Sapiens
VAPEEHPVL

SEQ ID NO: 152866 - protein, 9 aa, Homo Sapiens
VAPPGCSHL

SEQ ID NO: 152867 - protein, 9 aa, Homo Sapiens
VAPPVSGDL

SEQ ID NO: 152868 - protein, 9 aa, Homo Sapiens
VAQELPTTL

SEQ ID NO: 152869 - protein, 9 aa, Homo Sapiens
VAQSNFEAL

SEQ ID NO: 152870 - protein, 9 aa, Homo Sapiens
VASAVCLRL

SEQ ID NO: 152871 - protein, 9 aa, Homo Sapiens
VASEIMAVL

SEQ ID NO: 152872 - protein, 9 aa, Homo Sapiens
VASELHTSL

SEQ ID NO: 152873 - protein, 9 aa, Homo Sapiens
VASEVNLTA

SEQ ID NO: 152874 - protein, 9 aa, Homo Sapiens
VASEVSTSL

SEQ ID NO: 152875 - protein, 9 aa, Homo Sapiens
VASEVYKAV

SEQ ID NO: 152876 - protein, 9 aa, Homo Sapiens
VASEYPVIL

SEQ ID NO: 152877 - protein, 9 aa, Homo Sapiens
VASKVFYHL

SEQ ID NO: 152878 - protein, 9 aa, Homo Sapiens
VASPPTHAA

SEQ ID NO: 152879 - protein, 9 aa, Homo Sapiens
VASQITEAL

SEQ ID NO: 152880 - protein, 9 aa, Homo Sapiens
VASSLYDIL

SEQ ID NO: 152881 - protein, 9 aa, Homo Sapiens
VATAADLEL

SEQ ID NO: 152882 - protein, 9 aa, Homo Sapiens
VATDFFTVL

SEQ ID NO: 152883 - protein, 9 aa, Homo Sapiens
VATEGAEVL

SEQ ID NO: 152884 - protein, 9 aa, Homo Sapiens
VATGVISTL

SEQ ID NO: 152885 - protein, 9 aa, Homo Sapiens
VATKIFQEL

SEQ ID NO: 152886 - protein, 9 aa, Homo Sapiens
VATWVDETL

SEQ ID NO: 152887 - protein, 9 aa, Homo Sapiens
VAVDGINAL

SEQ ID NO: 152888 - protein, 9 aa, Homo Sapiens
VAVEPGAAV

SEQ ID NO: 152889 - protein, 9 aa, Homo Sapiens
VAVGAEHTL

SEQ ID NO: 152890 - protein, 9 aa, Homo Sapiens
VAVGEFQEV

SEQ ID NO: 152891 - protein, 9 aa, Homo Sapiens
VAVGVIKAV

SEQ ID NO: 152892 - protein, 9 aa, Homo Sapiens
VAVISGEAL

SEQ ID NO: 152893 - protein, 9 aa, Homo Sapiens
VAVPLYDTL

SEQ ID NO: 152894 - protein, 9 aa, Homo Sapiens
VAVQHFSLL

SEQ ID NO: 152895 - protein, 9 aa, Homo Sapiens
VAVQPGEQL

SEQ ID NO: 152896 - protein, 9 aa, Homo Sapiens
VAWADARSL

SEQ ID NO: 152897 - protein, 9 aa, Homo Sapiens
VAYDSDYAL

SEQ ID NO: 152898 - protein, 9 aa, Homo Sapiens
VAYGLHELL

SEQ ID NO: 152899 - protein, 9 aa, Homo Sapiens
VAYIDGQVL

SEQ ID NO: 152900 - protein, 9 aa, Homo Sapiens
VAYLQAHAL

SEQ ID NO: 152901 - protein, 9 aa, Homo Sapiens
VAYVSSVAL

SEQ ID NO: 152902 - protein, 9 aa, Homo Sapiens
VGAPVGIAL

SEQ ID NO: 152903 - protein, 9 aa, Homo Sapiens
VGDPHTVTV

SEQ ID NO: 152904 - protein, 9 aa, Homo Sapiens
VGDPSVHLL

SEQ ID NO: 152905 - protein, 9 aa, Homo Sapiens
VGHVMGSAL

SEQ ID NO: 152906 - protein, 9 aa, Homo Sapiens
VIAPPDFVL

SEQ ID NO: 152907 - protein, 9 aa, Homo Sapiens
VIDGEFKEL

SEQ ID NO: 152908 - protein, 9 aa, Homo Sapiens
VIDGHIYAV

SEQ ID NO: 152909 - protein, 9 aa, Homo Sapiens
VIDGKMYEL

SEQ ID NO: 152910 - protein, 9 aa, Homo Sapiens
VIHDFLFSL

SEQ ID NO: 152911 - protein, 9 aa, Homo Sapiens
VIIDDHPEV

SEQ ID NO: 152912 - protein, 9 aa, Homo Sapiens
VIIGSTHVL

SEQ ID NO: 152913 - protein, 9 aa, Homo Sapiens
VIISDAHVL

SEQ ID NO: 152914 - protein, 9 aa, Homo Sapiens
VILEPMQEL

SEQ ID NO: 152915 - protein, 9 aa, Homo Sapiens
VIMDNFEYL

SEQ ID NO: 152916 - protein, 9 aa, Homo Sapiens
VIMEPHKEV

SEQ ID NO: 152917 - protein, 9 aa, Homo Sapiens
VIQEAFIEL

SEQ ID NO: 152918 - protein, 9 aa, Homo Sapiens
VIQENEHAL

SEQ ID NO: 152919 - protein, 9 aa, Homo Sapiens
VISLEGKPL

SEQ ID NO: 152920 - protein, 9 aa, Homo Sapiens
VIVEPLEQL

SEQ ID NO: 152921 - protein, 9 aa, Homo Sapiens
VIVPLYDTL

SEQ ID NO: 152922 - protein, 9 aa, Homo Sapiens
VLDAHFLVL

SEQ ID NO: 152923 - protein, 9 aa, Homo Sapiens
VLYPGCDTL

SEQ ID NO: 152924 - protein, 9 aa, Homo Sapiens
VNHFQKDSI

SEQ ID NO: 152925 - protein, 9 aa, Homo Sapiens
VPAALTPRA

SEQ ID NO: 152926 - protein, 9 aa, Homo Sapiens
VPAKKITAA

SEQ ID NO: 152927 - protein, 9 aa, Homo Sapiens
VPHQPFSQA

SEQ ID NO: 152928 - protein, 9 aa, Homo Sapiens
VPRPPSNPP

SEQ ID NO: 152929 - protein, 9 aa, Homo Sapiens
VPSAVLIVA

SEQ ID NO: 152930 - protein, 9 aa, Homo Sapiens
VPSYPSKSA

SEQ ID NO: 152931 - protein, 9 aa, Homo Sapiens
VPTKRPPVL

SEQ ID NO: 152932 - protein, 9 aa, Homo Sapiens
VPYGTPLSV

SEQ ID NO: 152933 - protein, 9 aa, Homo Sapiens
VPYGVGKAA

SEQ ID NO: 152934 - protein, 9 aa, Homo Sapiens
VPYPPLLRA

SEQ ID NO: 152935 - protein, 9 aa, Homo Sapiens
VSAGIQTSF

SEQ ID NO: 152936 - protein, 9 aa, Homo Sapiens
VSAPVTHQL

SEQ ID NO: 152937 - protein, 9 aa, Homo Sapiens
VSCGEAHTL

SEQ ID NO: 152938 - protein, 9 aa, Homo Sapiens
VSDDTVMHL

SEQ ID NO: 152939 - protein, 9 aa, Homo Sapiens
VSDGVPLVL

SEQ ID NO: 152940 - protein, 9 aa, Homo Sapiens
VSDQANHVL

SEQ ID NO: 152941 - protein, 9 aa, Homo Sapiens
VSDSGAHVL

SEQ ID NO: 152942 - protein, 9 aa, Homo Sapiens
VSFPGQEAL

SEQ ID NO: 152943 - protein, 9 aa, Homo Sapiens
VSHALQAAL

SEQ ID NO: 152944 - protein, 9 aa, Homo Sapiens
VSHLLQDNL

SEQ ID NO: 152945 - protein, 9 aa, Homo Sapiens
VSHVIVDEV

SEQ ID NO: 152946 - protein, 9 aa, Homo Sapiens
VSIGDSHCL

SEQ ID NO: 152947 - protein, 9 aa, Homo Sapiens
VSQAQKDEL

SEQ ID NO: 152948 - protein, 9 aa, Homo Sapiens
VSQELKEPL

SEQ ID NO: 152949 - protein, 9 aa, Homo Sapiens
VSSNDFSSL

SEQ ID NO: 152950 - protein, 9 aa, Homo Sapiens
VSYYEKHSL

SEQ ID NO: 152951 - protein, 9 aa, Homo Sapiens
VTDGALVVV

SEQ ID NO: 152952 - protein, 9 aa, Homo Sapiens
VTDHNLHEL

SEQ ID NO: 152953 - protein, 9 aa, Homo Sapiens
VTEAVFHSL

SEQ ID NO: 152954 - protein, 9 aa, Homo Sapiens
VTHLLQQEL

SEQ ID NO: 152955 - protein, 9 aa, Homo Sapiens
VTLEPHIEL

SEQ ID NO: 152956 - protein, 9 aa, Homo Sapiens
VTVPPGPSL

SEQ ID NO: 152957 - protein, 9 aa, Homo Sapiens
VTVRPGLAM

SEQ ID NO: 152958 - protein, 9 aa, Homo Sapiens
VTVSPDGSL

SEQ ID NO: 152959 - protein, 9 aa, Homo Sapiens
VTYPGELLL

SEQ ID NO: 152960 - protein, 9 aa, Homo Sapiens
VVADLFHSL

SEQ ID NO: 152961 - protein, 9 aa, Homo Sapiens
VVANVQLVL

SEQ ID NO: 152962 - protein, 9 aa, Homo Sapiens
VVAPAGITL

SEQ ID NO: 152963 - protein, 9 aa, Homo Sapiens
VVCGLIFRL

SEQ ID NO: 152964 - protein, 9 aa, Homo Sapiens
VVCPVSDIL

SEQ ID NO: 152965 - protein, 9 aa, Homo Sapiens
VVDGGAIPA

SEQ ID NO: 152966 - protein, 9 aa, Homo Sapiens
VVDGTPLVA

SEQ ID NO: 152967 - protein, 9 aa, Homo Sapiens
VVDHVFPLL

SEQ ID NO: 152968 - protein, 9 aa, Homo Sapiens
VVFDDSEPV

SEQ ID NO: 152969 - protein, 9 aa, Homo Sapiens
VVIEPISEL

SEQ ID NO: 152970 - protein, 9 aa, Homo Sapiens
VVQGDPREL

SEQ ID NO: 152971 - protein, 9 aa, Homo Sapiens
VVVAVGRAL

SEQ ID NO: 152972 - protein, 9 aa, Homo Sapiens
VVVDPIQSV

SEQ ID NO: 152973 - protein, 9 aa, Homo Sapiens
VVVQPYNSL

SEQ ID NO: 152974 - protein, 9 aa, Homo Sapiens
WALDDHHAL

SEQ ID NO: 152975 - protein, 9 aa, Homo Sapiens
YAAGAKLVL

SEQ ID NO: 152976 - protein, 9 aa, Homo Sapiens
YAAGVHSVL

SEQ ID NO: 152977 - protein, 9 aa, Homo Sapiens
YAAQASQAL

SEQ ID NO: 152978 - protein, 9 aa, Homo Sapiens
YAAYPLTEV

SEQ ID NO: 152979 - protein, 9 aa, Homo Sapiens
YACGFSVLL

SEQ ID NO: 152980 - protein, 9 aa, Homo Sapiens
YADGYSPPL

SEQ ID NO: 152981 - protein, 9 aa, Homo Sapiens
YADPNFVRT

SEQ ID NO: 152982 - protein, 9 aa, Homo Sapiens
YADPSILYI

SEQ ID NO: 152983 - protein, 9 aa, Homo Sapiens
YADQHSVQV

SEQ ID NO: 152984 - protein, 9 aa, Homo Sapiens
YADTCFSTI

SEQ ID NO: 152985 - protein, 9 aa, Homo Sapiens
YAEQLHVQL

SEQ ID NO: 152986 - protein, 9 aa, Homo Sapiens
YAETIAHIL

SEQ ID NO: 152987 - protein, 9 aa, Homo Sapiens
YAETLFDIL

SEQ ID NO: 152988 - protein, 9 aa, Homo Sapiens
YAFGGGCEL

SEQ ID NO: 152989 - protein, 9 aa, Homo Sapiens
YAFKDNSNL

SEQ ID NO: 152990 - protein, 9 aa, Homo Sapiens
YAFLLDKAL

SEQ ID NO: 152991 - protein, 9 aa, Homo Sapiens
YAFPKAVSV

SEQ ID NO: 152992 - protein, 9 aa, Homo Sapiens
YAFPKSITV

SEQ ID NO: 152993 - protein, 9 aa, Homo Sapiens
YAFPLAHSL

SEQ ID NO: 152994 - protein, 9 aa, Homo Sapiens
YAFQDDRYL

SEQ ID NO: 152995 - protein, 9 aa, Homo Sapiens
YAFQDENHL

SEQ ID NO: 152996 - protein, 9 aa, Homo Sapiens
YAFSGVEEL

SEQ ID NO: 152997 - protein, 9 aa, Homo Sapiens
YAIESQLQL

SEQ ID NO: 152998 - protein, 9 aa, Homo Sapiens
YAIEVDPVL

SEQ ID NO: 152999 - protein, 9 aa, Homo Sapiens
YAIGRSDTV

SEQ ID NO: 153000 - protein, 9 aa, Homo Sapiens
YAIGVSHPL

SEQ ID NO: 153001 - protein, 9 aa, Homo Sapiens
YAIHGVLEV

SEQ ID NO: 153002 - protein, 9 aa, Homo Sapiens
YAINQPDVL

SEQ ID NO: 153003 - protein, 9 aa, Homo Sapiens
YAIQATETL

SEQ ID NO: 153004 - protein, 9 aa, Homo Sapiens
YAIREEIVL

SEQ ID NO: 153005 - protein, 9 aa, Homo Sapiens
YAISKPDIL

SEQ ID NO: 153006 - protein, 9 aa, Homo Sapiens
YAISKPEVL

SEQ ID NO: 153007 - protein, 9 aa, Homo Sapiens
YAISPGLDI

SEQ ID NO: 153008 - protein, 9 aa, Homo Sapiens
YAITTLHNL

SEQ ID NO: 153009 - protein, 9 aa, Homo Sapiens
YALDLIDKL

SEQ ID NO: 153010 - protein, 9 aa, Homo Sapiens
YALDLSTFL

SEQ ID NO: 153011 - protein, 9 aa, Homo Sapiens
YALGKDFCL

SEQ ID NO: 153012 - protein, 9 aa, Homo Sapiens
YALNHTLSV

SEQ ID NO: 153013 - protein, 9 aa, Homo Sapiens
YALPAGLSA

SEQ ID NO: 153014 - protein, 9 aa, Homo Sapiens
YALYVRDTL

SEQ ID NO: 153015 - protein, 9 aa, Homo Sapiens
YAMDELRSL

SEQ ID NO: 153016 - protein, 9 aa, Homo Sapiens
YANEVGEAF

SEQ ID NO: 153017 - protein, 9 aa, Homo Sapiens
YAQTQLDKL

SEQ ID NO: 153018 - protein, 9 aa, Homo Sapiens
YASDYFDQL

SEQ ID NO: 153019 - protein, 9 aa, Homo Sapiens
YASNITSVL

SEQ ID NO: 153020 - protein, 9 aa, Homo Sapiens
YASPDLSKL

SEQ ID NO: 153021 - protein, 9 aa, Homo Sapiens
YASSPGMSL

SEQ ID NO: 153022 - protein, 9 aa, Homo Sapiens
YATDLVVCV

SEQ ID NO: 153023 - protein, 9 aa, Homo Sapiens
YATIILSKM

SEQ ID NO: 153024 - protein, 9 aa, Homo Sapiens
YATTGKCEL

SEQ ID NO: 153025 - protein, 9 aa, Homo Sapiens
YAVELFEGL

SEQ ID NO: 153026 - protein, 9 aa, Homo Sapiens
YAVRDTIAL

SEQ ID NO: 153027 - protein, 9 aa, Homo Sapiens
YAYDGKDYI

SEQ ID NO: 153028 - protein, 9 aa, Homo Sapiens
YAYEKPHVV

SEQ ID NO: 153029 - protein, 9 aa, Homo Sapiens
YAYETKDAL

SEQ ID NO: 153030 - protein, 9 aa, Homo Sapiens
YAYNDKAIL

SEQ ID NO: 153031 - protein, 9 aa, Homo Sapiens
YAYRDAVFL

SEQ ID NO: 153032 - protein, 9 aa, Homo Sapiens
YAYTGRLEL

SEQ ID NO: 153033 - protein, 9 aa, Homo Sapiens
YGAEALERM

SEQ ID NO: 153034 - protein, 9 aa, Homo Sapiens
YGDEIAIEL

SEQ ID NO: 153035 - protein, 9 aa, Homo Sapiens
YGDHTKLIL

SEQ ID NO: 153036 - protein, 9 aa, Homo Sapiens
YGDPHSPVI

SEQ ID NO: 153037 - protein, 9 aa, Homo Sapiens
YGLEPAHPL

SEQ ID NO: 153038 - protein, 9 aa, Homo Sapiens
YGVTVFKAL

SEQ ID NO: 153039 - protein, 9 aa, Homo Sapiens
YGYEHILTL

SEQ ID NO: 153040 - protein, 9 aa, Homo Sapiens
YIDDVFHAL

SEQ ID NO: 153041 - protein, 9 aa, Homo Sapiens
YIDEGRLVL

SEQ ID NO: 153042 - protein, 9 aa, Homo Sapiens
YIFDNCHEL

SEQ ID NO: 153043 - protein, 9 aa, Homo Sapiens
YIIKDKHIL

SEQ ID NO: 153044 - protein, 9 aa, Homo Sapiens
YILDLQVVL

SEQ ID NO: 153045 - protein, 9 aa, Homo Sapiens
YILGKFFAL

SEQ ID NO: 153046 - protein, 9 aa, Homo Sapiens
YILPFSEVL

SEQ ID NO: 153047 - protein, 9 aa, Homo Sapiens
YITDLFQVL

SEQ ID NO: 153048 - protein, 9 aa, Homo Sapiens
YIVCDFHSL

SEQ ID NO: 153049 - protein, 9 aa, Homo Sapiens
YKDGTELEL

SEQ ID NO: 153050 - protein, 9 aa, Homo Sapiens
YLADIFTKL

SEQ ID NO: 153051 - protein, 9 aa, Homo Sapiens
YLFPGHPPT

SEQ ID NO: 153052 - protein, 9 aa, Homo Sapiens
YLIEPDVEL

SEQ ID NO: 153053 - protein, 9 aa, Homo Sapiens
YLLDLHSYL

SEQ ID NO: 153054 - protein, 9 aa, Homo Sapiens
YLTAEILEL

SEQ ID NO: 153055 - protein, 9 aa, Homo Sapiens
YLTAEVLEL

SEQ ID NO: 153056 - protein, 9 aa, Homo Sapiens
YQTEIGQTL

SEQ ID NO: 153057 - protein, 9 aa, Homo Sapiens
YQYLLVTAL

SEQ ID NO: 153058 - protein, 9 aa, Homo Sapiens
YQYPRPLLI

SEQ ID NO: 153059 - protein, 9 aa, Homo Sapiens
YSAEPLPEL

SEQ ID NO: 153060 - protein, 9 aa, Homo Sapiens
YSAPVIHVL

SEQ ID NO: 153061 - protein, 9 aa, Homo Sapiens
YSCDHNTSL

SEQ ID NO: 153062 - protein, 9 aa, Homo Sapiens
YSDDIPHAL

SEQ ID NO: 153063 - protein, 9 aa, Homo Sapiens
YSDFVVHEI

SEQ ID NO: 153064 - protein, 9 aa, Homo Sapiens
YSDGPGEAL

SEQ ID NO: 153065 - protein, 9 aa, Homo Sapiens
YSDPVTLET

SEQ ID NO: 153066 - protein, 9 aa, Homo Sapiens
YSDSFPMEL

SEQ ID NO: 153067 - protein, 9 aa, Homo Sapiens
YSFHKFHYL

SEQ ID NO: 153068 - protein, 9 aa, Homo Sapiens
YSFYLPIAA

SEQ ID NO: 153069 - protein, 9 aa, Homo Sapiens
YSFYNQQTL

SEQ ID NO: 153070 - protein, 9 aa, Homo Sapiens
YSHFLQFAL

SEQ ID NO: 153071 - protein, 9 aa, Homo Sapiens
YSHVDLVVM

SEQ ID NO: 153072 - protein, 9 aa, Homo Sapiens
YSLDHISSL

SEQ ID NO: 153073 - protein, 9 aa, Homo Sapiens
YSLFDNSKL

SEQ ID NO: 153074 - protein, 9 aa, Homo Sapiens
YSLRDEFPL

SEQ ID NO: 153075 - protein, 9 aa, Homo Sapiens
YSLYPDREL

SEQ ID NO: 153076 - protein, 9 aa, Homo Sapiens
YSMPVHAAV

SEQ ID NO: 153077 - protein, 9 aa, Homo Sapiens
YSNLHEQTL

SEQ ID NO: 153078 - protein, 9 aa, Homo Sapiens
YSVNDGAQL

SEQ ID NO: 153079 - protein, 9 aa, Homo Sapiens
YSYFEKETL

SEQ ID NO: 153080 - protein, 9 aa, Homo Sapiens
YTADGKEVL

SEQ ID NO: 153081 - protein, 9 aa, Homo Sapiens
YTCPVITNL

SEQ ID NO: 153082 - protein, 9 aa, Homo Sapiens
YTDATPLRV

SEQ ID NO: 153083 - protein, 9 aa, Homo Sapiens
YTDHQFTEL

SEQ ID NO: 153084 - protein, 9 aa, Homo Sapiens
YTDPSAEEL

SEQ ID NO: 153085 - protein, 9 aa, Homo Sapiens
YTHVDDCSL

SEQ ID NO: 153086 - protein, 9 aa, Homo Sapiens
YTIYDSETL

SEQ ID NO: 153087 - protein, 9 aa, Homo Sapiens
YTSEVQAIL

SEQ ID NO: 153088 - protein, 9 aa, Homo Sapiens
YTSPVIPAL

SEQ ID NO: 153089 - protein, 9 aa, Homo Sapiens
YTSPVNPAV

SEQ ID NO: 153090 - protein, 9 aa, Homo Sapiens
YVADLGDIL

SEQ ID NO: 153091 - protein, 9 aa, Homo Sapiens
YVAQAGLEL

SEQ ID NO: 153092 - protein, 9 aa, Homo Sapiens
YVDDGLISL

SEQ ID NO: 153093 - protein, 9 aa, Homo Sapiens
YVDDTQFVQ

SEQ ID NO: 153094 - protein, 9 aa, Homo Sapiens
YVDGRVLVV

SEQ ID NO: 153095 - protein, 9 aa, Homo Sapiens
YVIELQHVV

SEQ ID NO: 153096 - protein, 9 aa, Homo Sapiens
YVINDLTAV

SEQ ID NO: 153097 - protein, 9 aa, Homo Sapiens
YVNLPTIAL

SEQ ID NO: 153098 - protein, 9 aa, Homo Sapiens
YVQDYEDFM

SEQ ID NO: 153099 - protein, 9 aa, Homo Sapiens
YVSDLELSA

SEQ ID NO: 153100 - protein, 9 aa, Homo Sapiens
YVVDDAAVL

SEQ ID NO: 153101 - protein, 9 aa, Homo Sapiens
YVYSGVETL

SEQ ID NO: 153102 - protein, 10 aa, Homo Sapiens
AAAAAAKVPA

SEQ ID NO: 153103 - protein, 10 aa, Homo Sapiens
AAAEIYEEFL

SEQ ID NO: 153104 - protein, 10 aa, Homo Sapiens
AAAEVLGLIL

SEQ ID NO: 153105 - protein, 10 aa, Homo Sapiens
AADPGLHETL

SEQ ID NO: 153106 - protein, 10 aa, Homo Sapiens
AADTSEARPF

SEQ ID NO: 153107 - protein, 10 aa, Homo Sapiens
AAFLGHLEVL

SEQ ID NO: 153108 - protein, 10 aa, Homo Sapiens
AAIEPDGNGL

SEQ ID NO: 153109 - protein, 10 aa, Homo Sapiens
AAINPELLQL

SEQ ID NO: 153110 - protein, 10 aa, Homo Sapiens
AAVSFAKDFL

SEQ ID NO: 153111 - protein, 10 aa, Homo Sapiens
AAYNGHCEAL

SEQ ID NO: 153112 - protein, 10 aa, Homo Sapiens
APQETRGIPS

SEQ ID NO: 153113 - protein, 10 aa, Homo Sapiens
APRGTGIVSA

SEQ ID NO: 153114 - protein, 10 aa, Homo Sapiens
APYFKGTAVV

SEQ ID NO: 153115 - protein, 10 aa, Homo Sapiens
CALEGRDPEL

SEQ ID NO: 153116 - protein, 10 aa, Homo Sapiens
FAATADPAAL

SEQ ID NO: 153117 - protein, 10 aa, Homo Sapiens
FADDNRFDFL

SEQ ID NO: 153118 - protein, 10 aa, Homo Sapiens
FADDTYPRWV

SEQ ID NO: 153119 - protein, 10 aa, Homo Sapiens
FADPNMLDTL

SEQ ID NO: 153120 - protein, 10 aa, Homo Sapiens
FAEPGSEVYL

SEQ ID NO: 153121 - protein, 10 aa, Homo Sapiens
FAFESDLHSL

SEQ ID NO: 153122 - protein, 10 aa, Homo Sapiens
FAHDDSVMYL

SEQ ID NO: 153123 - protein, 10 aa, Homo Sapiens
FALEPIDITV

SEQ ID NO: 153124 - protein, 10 aa, Homo Sapiens
FALFEKKGAL

SEQ ID NO: 153125 - protein, 10 aa, Homo Sapiens
FALPSPQHIL

SEQ ID NO: 153126 - protein, 10 aa, Homo Sapiens
FAQDGQHQVL

SEQ ID NO: 153127 - protein, 10 aa, Homo Sapiens
FASFEAQGAL

SEQ ID NO: 153128 - protein, 10 aa, Homo Sapiens
FAVEPQGPAL

SEQ ID NO: 153129 - protein, 10 aa, Homo Sapiens
FAVGYKTDEF

SEQ ID NO: 153130 - protein, 10 aa, Homo Sapiens
FAYDGKDYIA

SEQ ID NO: 153131 - protein, 10 aa, Homo Sapiens
FAYKQENEML

SEQ ID NO: 153132 - protein, 10 aa, Homo Sapiens
FAYPNRPDVL

SEQ ID NO: 153133 - protein, 10 aa, Homo Sapiens
FIMEGGAMVL

SEQ ID NO: 153134 - protein, 10 aa, Homo Sapiens
FPKPYPNSEA

SEQ ID NO: 153135 - protein, 10 aa, Homo Sapiens
FSDPAVSQSL

SEQ ID NO: 153136 - protein, 10 aa, Homo Sapiens
FSLDPDIDTL

SEQ ID NO: 153137 - protein, 10 aa, Homo Sapiens
FSYYNSHDSL

SEQ ID NO: 153138 - protein, 10 aa, Homo Sapiens
FVAPPGNISL

SEQ ID NO: 153139 - protein, 10 aa, Homo Sapiens
FVDPNGKISL

SEQ ID NO: 153140 - protein, 10 aa, Homo Sapiens
FVDPSQDHAL

SEQ ID NO: 153141 - protein, 10 aa, Homo Sapiens
FVEDTECRTL

SEQ ID NO: 153142 - protein, 10 aa, Homo Sapiens
FVIQEQNVAL

SEQ ID NO: 153143 - protein, 10 aa, Homo Sapiens
GFGGGGFGSR

SEQ ID NO: 153144 - protein, 10 aa, Homo Sapiens
GPWVGTGLAA

SEQ ID NO: 153145 - protein, 10 aa, Homo Sapiens
HAAEYGAEAL

SEQ ID NO: 153146 - protein, 10 aa, Homo Sapiens
HLHNMPPSAL

SEQ ID NO: 153147 - protein, 10 aa, Homo Sapiens
HPTEDLVVSA

SEQ ID NO: 153148 - protein, 10 aa, Homo Sapiens
HPWETVTTAA

SEQ ID NO: 153149 - protein, 10 aa, Homo Sapiens
IADPKTDHRL

SEQ ID NO: 153150 - protein, 10 aa, Homo Sapiens
IAGPVVEISH

SEQ ID NO: 153151 - protein, 10 aa, Homo Sapiens
IASTFDHPEL

SEQ ID NO: 153152 - protein, 10 aa, Homo Sapiens
IAVEPGNQWF

SEQ ID NO: 153153 - protein, 10 aa, Homo Sapiens
IAVSPESQEM

SEQ ID NO: 153154 - protein, 10 aa, Homo Sapiens
IAYYVSNEEL

SEQ ID NO: 153155 - protein, 10 aa, Homo Sapiens
IESIGCSIQL

SEQ ID NO: 153156 - protein, 10 aa, Homo Sapiens
IPKHINPVAA

SEQ ID NO: 153157 - protein, 10 aa, Homo Sapiens
IPLYLKGGVA

SEQ ID NO: 153158 - protein, 10 aa, Homo Sapiens
KADPCVAHAL

SEQ ID NO: 153159 - protein, 10 aa, Homo Sapiens
KADPHCLNFL

SEQ ID NO: 153160 - protein, 10 aa, Homo Sapiens
KAIDLFTDAI

SEQ ID NO: 153161 - protein, 10 aa, Homo Sapiens
KAIGNAFAVL

SEQ ID NO: 153162 - protein, 10 aa, Homo Sapiens
KAVDPSSVAL

SEQ ID NO: 153163 - protein, 10 aa, Homo Sapiens
KAVDPTSGQL

SEQ ID NO: 153164 - protein, 10 aa, Homo Sapiens
KAVTEQGAEL

SEQ ID NO: 153165 - protein, 10 aa, Homo Sapiens
KPKEVTTVKV

SEQ ID NO: 153166 - protein, 10 aa, Homo Sapiens
KVCGKPFHSL

SEQ ID NO: 153167 - protein, 10 aa, Homo Sapiens
KVDEVGGEAL

SEQ ID NO: 153168 - protein, 10 aa, Homo Sapiens
LADCSHPQEL

SEQ ID NO: 153169 - protein, 10 aa, Homo Sapiens
LADTSDSRAL

SEQ ID NO: 153170 - protein, 10 aa, Homo Sapiens
LAFLGNGDVL

SEQ ID NO: 153171 - protein, 10 aa, Homo Sapiens
LAQDPENQAL

SEQ ID NO: 153172 - protein, 10 aa, Homo Sapiens
LAVDPAILLI

SEQ ID NO: 153173 - protein, 10 aa, Homo Sapiens
LAVEHDNISL

SEQ ID NO: 153174 - protein, 10 aa, Homo Sapiens
LAVHPSGVAL

SEQ ID NO: 153175 - protein, 10 aa, Homo Sapiens
LAYSGKLEEL

SEQ ID NO: 153176 - protein, 10 aa, Homo Sapiens
LDNLECGDIL

SEQ ID NO: 153177 - protein, 10 aa, Homo Sapiens
LPHSAGRYAA

SEQ ID NO: 153178 - protein, 10 aa, Homo Sapiens
LPSGCYGRVA

SEQ ID NO: 153179 - protein, 10 aa, Homo Sapiens
LSDPQVHTVL

SEQ ID NO: 153180 - protein, 10 aa, Homo Sapiens
MALVPRNDSL

SEQ ID NO: 153181 - protein, 10 aa, Homo Sapiens
MAMEPDRKAA

SEQ ID NO: 153182 - protein, 10 aa, Homo Sapiens
MPNGDHIVSA

SEQ ID NO: 153183 - protein, 10 aa, Homo Sapiens
MPNGTPHPTA

SEQ ID NO: 153184 - protein, 10 aa, Homo Sapiens
NAAVPDSVAL

SEQ ID NO: 153185 - protein, 10 aa, Homo Sapiens
NAVPGDVLVL

SEQ ID NO: 153186 - protein, 10 aa, Homo Sapiens
NAVRIEQEFL

SEQ ID NO: 153187 - protein, 10 aa, Homo Sapiens
NPKVQASLAA

SEQ ID NO: 153188 - protein, 10 aa, Homo Sapiens
NPYNGGGRVA

SEQ ID NO: 153189 - protein, 10 aa, Homo Sapiens
PSSAAPPLFN

SEQ ID NO: 153190 - protein, 10 aa, Homo Sapiens
QAINPKLLQL

SEQ ID NO: 153191 - protein, 10 aa, Homo Sapiens
QALPPDVVSL

SEQ ID NO: 153192 - protein, 10 aa, Homo Sapiens
RAEEPPTPAL

SEQ ID NO: 153193 - protein, 10 aa, Homo Sapiens
RAIDNQYTPL

SEQ ID NO: 153194 - protein, 10 aa, Homo Sapiens
RALDHEEEAL

SEQ ID NO: 153195 - protein, 10 aa, Homo Sapiens
RAMEGELGEL

SEQ ID NO: 153196 - protein, 10 aa, Homo Sapiens
RAMVASGSEL

SEQ ID NO: 153197 - protein, 10 aa, Homo Sapiens
RPAAAPPAGA

SEQ ID NO: 153198 - protein, 10 aa, Homo Sapiens
RPAPHFERTA

SEQ ID NO: 153199 - protein, 10 aa, Homo Sapiens
RPAPLPAAVV

SEQ ID NO: 153200 - protein, 10 aa, Homo Sapiens
RPFEGFQRKA

SEQ ID NO: 153201 - protein, 10 aa, Homo Sapiens
RPIPNQPPTA

SEQ ID NO: 153202 - protein, 10 aa, Homo Sapiens
RPKPPNVRTA

SEQ ID NO: 153203 - protein, 10 aa, Homo Sapiens
RPKPPSATSI

SEQ ID NO: 153204 - protein, 10 aa, Homo Sapiens
RPRTEVSLSA

SEQ ID NO: 153205 - protein, 10 aa, Homo Sapiens
RPYGCVLRAA

SEQ ID NO: 153206 - protein, 10 aa, Homo Sapiens
SACPDKGIVL

SEQ ID NO: 153207 - protein, 10 aa, Homo Sapiens
SAFSPSSDSL

SEQ ID NO: 153208 - protein, 10 aa, Homo Sapiens
SAIDVLGETL

SEQ ID NO: 153209 - protein, 10 aa, Homo Sapiens
SAMDLPDVTL

SEQ ID NO: 153210 - protein, 10 aa, Homo Sapiens
SAYDSTMETM

SEQ ID NO: 153211 - protein, 10 aa, Homo Sapiens
SIADADGLFM

SEQ ID NO: 153212 - protein, 10 aa, Homo Sapiens
SIVDPQNQTM

SEQ ID NO: 153213 - protein, 10 aa, Homo Sapiens
SMDNNRSLDL

SEQ ID NO: 153214 - protein, 10 aa, Homo Sapiens
SPHAHISEQA

SEQ ID NO: 153215 - protein, 10 aa, Homo Sapiens
SPHPPSEVTA

SEQ ID NO: 153216 - protein, 10 aa, Homo Sapiens
SPIENIQRVA

SEQ ID NO: 153217 - protein, 10 aa, Homo Sapiens
SPITGEKIPA

SEQ ID NO: 153218 - protein, 10 aa, Homo Sapiens
SPVPSHWMVA

SEQ ID NO: 153219 - protein, 10 aa, Homo Sapiens
STPSEPHPVL

SEQ ID NO: 153220 - protein, 10 aa, Homo Sapiens
SVGESSSKGP

SEQ ID NO: 153221 - protein, 10 aa, Homo Sapiens
TACAHTNVTL

SEQ ID NO: 153222 - protein, 10 aa, Homo Sapiens
TALGPELLAL

SEQ ID NO: 153223 - protein, 10 aa, Homo Sapiens
TAVEGDEVSL

SEQ ID NO: 153224 - protein, 10 aa, Homo Sapiens
TPFQGQGHGA

SEQ ID NO: 153225 - protein, 10 aa, Homo Sapiens
TVVEPYNATL

SEQ ID NO: 153226 - protein, 10 aa, Homo Sapiens
VADDQGQHPL

SEQ ID NO: 153227 - protein, 10 aa, Homo Sapiens
VADGIFKAEL

SEQ ID NO: 153228 - protein, 10 aa, Homo Sapiens
VAEEPAGTSL

SEQ ID NO: 153229 - protein, 10 aa, Homo Sapiens
VAHDGSATYL

SEQ ID NO: 153230 - protein, 10 aa, Homo Sapiens
VAPVGSGSAL

SEQ ID NO: 153231 - protein, 10 aa, Homo Sapiens
VATPPDGVSL

SEQ ID NO: 153232 - protein, 10 aa, Homo Sapiens
VAVDGGKDSL

SEQ ID NO: 153233 - protein, 10 aa, Homo Sapiens
VIADPRGNTL

SEQ ID NO: 153234 - protein, 10 aa, Homo Sapiens
VIDPATATSV

SEQ ID NO: 153235 - protein, 10 aa, Homo Sapiens
VPRQPTVTSV

SEQ ID NO: 153236 - protein, 10 aa, Homo Sapiens
VVIEDFESSL

SEQ ID NO: 153237 - protein, 10 aa, Homo Sapiens
YADPGAEVKI

SEQ ID NO: 153238 - protein, 10 aa, Homo Sapiens
YADPTKRLEL

SEQ ID NO: 153239 - protein, 10 aa, Homo Sapiens
YAHFGIHEEM

SEQ ID NO: 153240 - protein, 10 aa, Homo Sapiens
YAILEKKGAL

SEQ ID NO: 153241 - protein, 10 aa, Homo Sapiens
YALGKDFVTL

SEQ ID NO: 153242 - protein, 10 aa, Homo Sapiens
YAMRAFADAL

SEQ ID NO: 153243 - protein, 10 aa, Homo Sapiens
YASFIEDNEL

SEQ ID NO: 153244 - protein, 10 aa, Homo Sapiens
YAVDRAITHL

SEQ ID NO: 153245 - protein, 10 aa, Homo Sapiens
YAVEGRDLTL

SEQ ID NO: 153246 - protein, 10 aa, Homo Sapiens
YAVELVNDSL

SEQ ID NO: 153247 - protein, 10 aa, Homo Sapiens
YAYDGKDYIA

SEQ ID NO: 153248 - protein, 10 aa, Homo Sapiens
YIHFSEDLTL

SEQ ID NO: 153249 - protein, 10 aa, Homo Sapiens
YTGGSLIPLL

SEQ ID NO: 153250 - protein, 10 aa, Homo Sapiens
YVLDGSGHIL

SEQ ID NO: 153251 - protein, 10 aa, Homo Sapiens
YVPDQPHPEI

SEQ ID NO: 153252 - protein, 11 aa, Homo Sapiens
AAAESGAKEEL

SEQ ID NO: 153253 - protein, 11 aa, Homo Sapiens
AAAPPSPPFSF

SEQ ID NO: 153254 - protein, 11 aa, Homo Sapiens
AAAQPTEEQVL

SEQ ID NO: 153255 - protein, 11 aa, Homo Sapiens
AAAQSREIDCL

SEQ ID NO: 153256 - protein, 11 aa, Homo Sapiens
AACDPRHGRYL

SEQ ID NO: 153257 - protein, 11 aa, Homo Sapiens
AADVAQSTHVL

SEQ ID NO: 153258 - protein, 11 aa, Homo Sapiens
AAENPGKYNIL

SEQ ID NO: 153259 - protein, 11 aa, Homo Sapiens
AAFNSGKVDIV

SEQ ID NO: 153260 - protein, 11 aa, Homo Sapiens
AAFYEDKKGVL

SEQ ID NO: 153261 - protein, 11 aa, Homo Sapiens
AAIDARIFHEL

SEQ ID NO: 153262 - protein, 11 aa, Homo Sapiens
AAKTPSCKDIV

SEQ ID NO: 153263 - protein, 11 aa, Homo Sapiens
AALEEADKMFL

SEQ ID NO: 153264 - protein, 11 aa, Homo Sapiens
AALLDHDAFVL

SEQ ID NO: 153265 - protein, 11 aa, Homo Sapiens
AALPDASPGNL

SEQ ID NO: 153266 - protein, 11 aa, Homo Sapiens
AAVDATVNQVL

SEQ ID NO: 153267 - protein, 11 aa, Homo Sapiens
AIIDPGDSDII

SEQ ID NO: 153268 - protein, 11 aa, Homo Sapiens
AIIDPNHEIEF

SEQ ID NO: 153269 - protein, 11 aa, Homo Sapiens
ANITPREGDEL

SEQ ID NO: 153270 - protein, 11 aa, Homo Sapiens
APRAPRALAAA

SEQ ID NO: 153271 - protein, 11 aa, Homo Sapiens
APRPASGPIRP

SEQ ID NO: 153272 - protein, 11 aa, Homo Sapiens
ASVESSSGEAF

SEQ ID NO: 153273 - protein, 11 aa, Homo Sapiens
ATIDPDTISAL

SEQ ID NO: 153274 - protein, 11 aa, Homo Sapiens
EADRTLIYITL

SEQ ID NO: 153275 - protein, 11 aa, Homo Sapiens
FAAEVVHPGDL

SEQ ID NO: 153276 - protein, 11 aa, Homo Sapiens
FADDGVKYLEL

SEQ ID NO: 153277 - protein, 11 aa, Homo Sapiens
FADGSIRTSEL

SEQ ID NO: 153278 - protein, 11 aa, Homo Sapiens
FAEDITTGQVL

SEQ ID NO: 153279 - protein, 11 aa, Homo Sapiens
FAEDVGSNKGA

SEQ ID NO: 153280 - protein, 11 aa, Homo Sapiens
FAFEGIGDEDL

SEQ ID NO: 153281 - protein, 11 aa, Homo Sapiens
FAHFPGLASEL

SEQ ID NO: 153282 - protein, 11 aa, Homo Sapiens
FAVESEHDQAM

SEQ ID NO: 153283 - protein, 11 aa, Homo Sapiens
FAVPPALGSNL

SEQ ID NO: 153284 - protein, 11 aa, Homo Sapiens
FAYDGKDYIAL

SEQ ID NO: 153285 - protein, 11 aa, Homo Sapiens
FAYDGKDYLTL

SEQ ID NO: 153286 - protein, 11 aa, Homo Sapiens
FAYDPSNYEYL

SEQ ID NO: 153287 - protein, 11 aa, Homo Sapiens
FAYTGRTAQEL

SEQ ID NO: 153288 - protein, 11 aa, Homo Sapiens
FILDPNQENVL

SEQ ID NO: 153289 - protein, 11 aa, Homo Sapiens
FIYNPTTGEFL

SEQ ID NO: 153290 - protein, 11 aa, Homo Sapiens
FSDDPNVTKTL

SEQ ID NO: 153291 - protein, 11 aa, Homo Sapiens
GAYDPADYEHL

SEQ ID NO: 153292 - protein, 11 aa, Homo Sapiens
GGSFRGSYGSS

SEQ ID NO: 153293 - protein, 11 aa, Homo Sapiens
GIWEPKKGDVL

SEQ ID NO: 153294 - protein, 11 aa, Homo Sapiens
HADTVGIDAVL

SEQ ID NO: 153295 - protein, 11 aa, Homo Sapiens
HAFGGLGSHAL

SEQ ID NO: 153296 - protein, 11 aa, Homo Sapiens
HAISPSAADVL

SEQ ID NO: 153297 - protein, 11 aa, Homo Sapiens
HAWSGGLDHQL

SEQ ID NO: 153298 - protein, 11 aa, Homo Sapiens
HAYDGKDYISL

SEQ ID NO: 153299 - protein, 11 aa, Homo Sapiens
IADEVQQRFEL

SEQ ID NO: 153300 - protein, 11 aa, Homo Sapiens
IAITSGEWEVL

SEQ ID NO: 153301 - protein, 11 aa, Homo Sapiens
IAPDVDTYKEI

SEQ ID NO: 153302 - protein, 11 aa, Homo Sapiens
IIHDPGRGAPL

SEQ ID NO: 153303 - protein, 11 aa, Homo Sapiens
IIMEPTECSEL

SEQ ID NO: 153304 - protein, 11 aa, Homo Sapiens
IIQDIDDTHVF

SEQ ID NO: 153305 - protein, 11 aa, Homo Sapiens
IIYEDPQHHPL

SEQ ID NO: 153306 - protein, 11 aa, Homo Sapiens
IQDPSFLHEAL

SEQ ID NO: 153307 - protein, 11 aa, Homo Sapiens
ISPANYEPVHW

SEQ ID NO: 153308 - protein, 11 aa, Homo Sapiens
KADPAAASHPL

SEQ ID NO: 153309 - protein, 11 aa, Homo Sapiens
KALEEPKYSSL

SEQ ID NO: 153310 - protein, 11 aa, Homo Sapiens
KAVTPSPEQVF

SEQ ID NO: 153311 - protein, 11 aa, Homo Sapiens
KAYTAVEGDEV

SEQ ID NO: 153312 - protein, 11 aa, Homo Sapiens
KSVDPENNPTL

SEQ ID NO: 153313 - protein, 11 aa, Homo Sapiens
KTDNSLLDQAL

SEQ ID NO: 153314 - protein, 11 aa, Homo Sapiens
LAADPGLHETL

SEQ ID NO: 153315 - protein, 11 aa, Homo Sapiens
LADETLLKVDL

SEQ ID NO: 153316 - protein, 11 aa, Homo Sapiens
LADMHSTEISL

SEQ ID NO: 153317 - protein, 11 aa, Homo Sapiens
LALDASQHSSL

SEQ ID NO: 153318 - protein, 11 aa, Homo Sapiens
LALDPSLVPTF

SEQ ID NO: 153319 - protein, 11 aa, Homo Sapiens
LAVDPNRAVPL

SEQ ID NO: 153320 - protein, 11 aa, Homo Sapiens
LILEPDKQEAL

SEQ ID NO: 153321 - protein, 11 aa, Homo Sapiens
LILTPTSKDVL

SEQ ID NO: 153322 - protein, 11 aa, Homo Sapiens
MAADRSESPSL

SEQ ID NO: 153323 - protein, 11 aa, Homo Sapiens
MAPSETQFSHL

SEQ ID NO: 153324 - protein, 11 aa, Homo Sapiens
NADPLKVYPPL

SEQ ID NO: 153325 - protein, 11 aa, Homo Sapiens
NAFEDSFSSIL

SEQ ID NO: 153326 - protein, 11 aa, Homo Sapiens
NALDGNRDTPL

SEQ ID NO: 153327 - protein, 11 aa, Homo Sapiens
NAVDDHGKSAL

SEQ ID NO: 153328 - protein, 11 aa, Homo Sapiens
NAVMVDIHDQL

SEQ ID NO: 153329 - protein, 11 aa, Homo Sapiens
NQFAYDGKDYI

SEQ ID NO: 153330 - protein, 11 aa, Homo Sapiens
NVKFPDEDEIL

SEQ ID NO: 153331 - protein, 11 aa, Homo Sapiens
NVYETTEFDQL

SEQ ID NO: 153332 - protein, 11 aa, Homo Sapiens
NVYNPSHSDSL

SEQ ID NO: 153333 - protein, 11 aa, Homo Sapiens
QAISGMIVPPM

SEQ ID NO: 153334 - protein, 11 aa, Homo Sapiens
RAAPAAAGAAL

SEQ ID NO: 153335 - protein, 11 aa, Homo Sapiens
RAAPLDSIHSL

SEQ ID NO: 153336 - protein, 11 aa, Homo Sapiens
RADDTFEALCI

SEQ ID NO: 153337 - protein, 11 aa, Homo Sapiens
RAFLDEDDMSL

SEQ ID NO: 153338 - protein, 11 aa, Homo Sapiens
RAIEALHGHEL

SEQ ID NO: 153339 - protein, 11 aa, Homo Sapiens
RALDAEEEACL

SEQ ID NO: 153340 - protein, 11 aa, Homo Sapiens
RALDEATKYAL

SEQ ID NO: 153341 - protein, 11 aa, Homo Sapiens
RAYYESEINSL

SEQ ID NO: 153342 - protein, 11 aa, Homo Sapiens
RPAGALVALVV

SEQ ID NO: 153343 - protein, 11 aa, Homo Sapiens
RPKPSSSPVIF

SEQ ID NO: 153344 - protein, 11 aa, Homo Sapiens
RPKSAFKVQNA

SEQ ID NO: 153345 - protein, 11 aa, Homo Sapiens
RSIPVNEKDTL

SEQ ID NO: 153346 - protein, 11 aa, Homo Sapiens
SAADPEFCHPL

SEQ ID NO: 153347 - protein, 11 aa, Homo Sapiens
SADTILIGHSL

SEQ ID NO: 153348 - protein, 11 aa, Homo Sapiens
SAFLPDGCDHL

SEQ ID NO: 153349 - protein, 11 aa, Homo Sapiens
SAIAAGVCGAL

SEQ ID NO: 153350 - protein, 11 aa, Homo Sapiens
SAVCSGLAHAL

SEQ ID NO: 153351 - protein, 11 aa, Homo Sapiens
SAVPVNHTQVM

SEQ ID NO: 153352 - protein, 11 aa, Homo Sapiens
SAYHASKCEFL

SEQ ID NO: 153353 - protein, 11 aa, Homo Sapiens
SFGAGGGFGSR

SEQ ID NO: 153354 - protein, 11 aa, Homo Sapiens
SPIENIQRVAA

SEQ ID NO: 153355 - protein, 11 aa, Homo Sapiens
TADDFLNRIAL

SEQ ID NO: 153356 - protein, 11 aa, Homo Sapiens
TADENPDKSTL

SEQ ID NO: 153357 - protein, 11 aa, Homo Sapiens
TAFSPDSRHVL

SEQ ID NO: 153358 - protein, 11 aa, Homo Sapiens
TAFTPAPEDSL

SEQ ID NO: 153359 - protein, 11 aa, Homo Sapiens
VAAPPTAVGSL

SEQ ID NO: 153360 - protein, 11 aa, Homo Sapiens
VACGVDHMVTL

SEQ ID NO: 153361 - protein, 11 aa, Homo Sapiens
VAFEVYDDFLH

SEQ ID NO: 153362 - protein, 11 aa, Homo Sapiens
VAFSPDQQQVL

SEQ ID NO: 153363 - protein, 11 aa, Homo Sapiens
VAIGTHDLDTL

SEQ ID NO: 153364 - protein, 11 aa, Homo Sapiens
VAIHPTSSEEL

SEQ ID NO: 153365 - protein, 11 aa, Homo Sapiens
VAKDPQDDDDL

SEQ ID NO: 153366 - protein, 11 aa, Homo Sapiens
VALSPKTNQTL

SEQ ID NO: 153367 - protein, 11 aa, Homo Sapiens
VAVGSAVGHTL

SEQ ID NO: 153368 - protein, 11 aa, Homo Sapiens
VAVHPSTVNPL

SEQ ID NO: 153369 - protein, 11 aa, Homo Sapiens
VAVSPDDRFIL

SEQ ID NO: 153370 - protein, 11 aa, Homo Sapiens
VIVDPETGKEM

SEQ ID NO: 153371 - protein, 11 aa, Homo Sapiens
VPKPIGGVVVF

SEQ ID NO: 153372 - protein, 11 aa, Homo Sapiens
VSVDASTKDSL

SEQ ID NO: 153373 - protein, 11 aa, Homo Sapiens
VTVKPSQSQVL

SEQ ID NO: 153374 - protein, 11 aa, Homo Sapiens
YACVPLVEQTL

SEQ ID NO: 153375 - protein, 11 aa, Homo Sapiens
YADPNFVRTFL

SEQ ID NO: 153376 - protein, 11 aa, Homo Sapiens
YAFGQETNVPL

SEQ ID NO: 153377 - protein, 11 aa, Homo Sapiens
YAFNSGNVERF

SEQ ID NO: 153378 - protein, 11 aa, Homo Sapiens
YALEEHENQRL

SEQ ID NO: 153379 - protein, 11 aa, Homo Sapiens
YAMPTKTIEVL

SEQ ID NO: 153380 - protein, 11 aa, Homo Sapiens
YAQDFGLVEEA

SEQ ID NO: 153381 - protein, 11 aa, Homo Sapiens
YAVDAYFREAL

SEQ ID NO: 153382 - protein, 11 aa, Homo Sapiens
YAYDGKDYIAL

SEQ ID NO: 153383 - protein, 11 aa, Homo Sapiens
YIMEPSIFNTL

SEQ ID NO: 153384 - protein, 11 aa, Homo Sapiens
YIWDPHNGDIL

SEQ ID NO: 153385 - protein, 11 aa, Homo Sapiens
YSDPGLAGVSL

SEQ ID NO: 153386 - protein, 11 aa, Homo Sapiens
YTFEPRTPDEL

SEQ ID NO: 153387 - protein, 11 aa, Homo Sapiens
YTHEFDGDEEF

SEQ ID NO: 153388 - protein, 11 aa, Homo Sapiens
YVIDSTDEERL

SEQ ID NO: 153389 - protein, 8 aa, Homo Sapiens
AADAGTFL

SEQ ID NO: 153390 - protein, 8 aa, Homo Sapiens
AADAVREL

SEQ ID NO: 153391 - protein, 8 aa, Homo Sapiens
AADGGPKL

SEQ ID NO: 153392 - protein, 8 aa, Homo Sapiens
AADGPQKL

SEQ ID NO: 153393 - protein, 8 aa, Homo Sapiens
AADGSVKL

SEQ ID NO: 153394 - protein, 8 aa, Homo Sapiens
AADISIIV

SEQ ID NO: 153395 - protein, 8 aa, Homo Sapiens
AADITSSL

SEQ ID NO: 153396 - protein, 8 aa, Homo Sapiens
AADQAKQL

SEQ ID NO: 153397 - protein, 8 aa, Homo Sapiens
AADSAVRL

SEQ ID NO: 153398 - protein, 8 aa, Homo Sapiens
AADVGISL

SEQ ID NO: 153399 - protein, 8 aa, Homo Sapiens
ADDKTVRL

SEQ ID NO: 153400 - protein, 8 aa, Homo Sapiens
AFDKHMNL

SEQ ID NO: 153401 - protein, 8 aa, Homo Sapiens
AGDEGRVL

SEQ ID NO: 153402 - protein, 8 aa, Homo Sapiens
AGDVSMFL

SEQ ID NO: 153403 - protein, 8 aa, Homo Sapiens
ALDDGSAL

SEQ ID NO: 153404 - protein, 8 aa, Homo Sapiens
ALDKATVL

SEQ ID NO: 153405 - protein, 8 aa, Homo Sapiens
ALDLNSVL

SEQ ID NO: 153406 - protein, 8 aa, Homo Sapiens
ALDTGFSL

SEQ ID NO: 153407 - protein, 8 aa, Homo Sapiens
ALDVNVAL

SEQ ID NO: 153408 - protein, 8 aa, Homo Sapiens
AQDEAFAL

SEQ ID NO: 153409 - protein, 8 aa, Homo Sapiens
AQDEIPAL

SEQ ID NO: 153410 - protein, 8 aa, Homo Sapiens
AQDPQAVL

SEQ ID NO: 153411 - protein, 8 aa, Homo Sapiens
AQDPSEVL

SEQ ID NO: 153412 - protein, 8 aa, Homo Sapiens
AQDQHYAL

SEQ ID NO: 153413 - protein, 8 aa, Homo Sapiens
AQDVELYL

SEQ ID NO: 153414 - protein, 8 aa, Homo Sapiens
ASDGTVRL

SEQ ID NO: 153415 - protein, 8 aa, Homo Sapiens
ASDIATSV

SEQ ID NO: 153416 - protein, 8 aa, Homo Sapiens
ASDPASSL

SEQ ID NO: 153417 - protein, 8 aa, Homo Sapiens
ASDVAQHL

SEQ ID NO: 153418 - protein, 8 aa, Homo Sapiens
ASDVHGNF

SEQ ID NO: 153419 - protein, 8 aa, Homo Sapiens
ATDIALLL

SEQ ID NO: 153420 - protein, 8 aa, Homo Sapiens
ATDITSSL

SEQ ID NO: 153421 - protein, 8 aa, Homo Sapiens
AVDAGMAM

SEQ ID NO: 153422 - protein, 8 aa, Homo Sapiens
AVDENNKL

SEQ ID NO: 153423 - protein, 8 aa, Homo Sapiens
AVDEPQML

SEQ ID NO: 153424 - protein, 8 aa, Homo Sapiens
AVDICAEL

SEQ ID NO: 153425 - protein, 8 aa, Homo Sapiens
AVDLPVTL

SEQ ID NO: 153426 - protein, 8 aa, Homo Sapiens
AVDPNRAV

SEQ ID NO: 153427 - protein, 8 aa, Homo Sapiens
AVDRTTEL

SEQ ID NO: 153428 - protein, 8 aa, Homo Sapiens
AVDTNLTL

SEQ ID NO: 153429 - protein, 8 aa, Homo Sapiens
AVDTSSEI

SEQ ID NO: 153430 - protein, 8 aa, Homo Sapiens
AVDVNNML

SEQ ID NO: 153431 - protein, 8 aa, Homo Sapiens
CSDRPTVI

SEQ ID NO: 153432 - protein, 8 aa, Homo Sapiens
DEASKKEI

SEQ ID NO: 153433 - protein, 8 aa, Homo Sapiens
DFDLHSEL

SEQ ID NO: 153434 - protein, 8 aa, Homo Sapiens
DQIFQALF

SEQ ID NO: 153435 - protein, 8 aa, Homo Sapiens
DVDVNHHL

SEQ ID NO: 153436 - protein, 8 aa, Homo Sapiens
EADVNIKL

SEQ ID NO: 153437 - protein, 8 aa, Homo Sapiens
EADVSSDL

SEQ ID NO: 153438 - protein, 8 aa, Homo Sapiens
EAPLAKWS

SEQ ID NO: 153439 - protein, 8 aa, Homo Sapiens
EVDINTTL

SEQ ID NO: 153440 - protein, 8 aa, Homo Sapiens
FADAHSNL

SEQ ID NO: 153441 - protein, 8 aa, Homo Sapiens
FADAITEL

SEQ ID NO: 153442 - protein, 8 aa, Homo Sapiens
FADAMEVI

SEQ ID NO: 153443 - protein, 8 aa, Homo Sapiens
FADATVEL

SEQ ID NO: 153444 - protein, 8 aa, Homo Sapiens
FADAVQEL

SEQ ID NO: 153445 - protein, 8 aa, Homo Sapiens
FADDMQEF

SEQ ID NO: 153446 - protein, 8 aa, Homo Sapiens
FADDMYSL

SEQ ID NO: 153447 - protein, 8 aa, Homo Sapiens
FADDVLNL

SEQ ID NO: 153448 - protein, 8 aa, Homo Sapiens
FADENFKL

SEQ ID NO: 153449 - protein, 8 aa, Homo Sapiens
FADFGSAL

SEQ ID NO: 153450 - protein, 8 aa, Homo Sapiens
FADGVILL

SEQ ID NO: 153451 - protein, 8 aa, Homo Sapiens
FADIGNTV

SEQ ID NO: 153452 - protein, 8 aa, Homo Sapiens
FADIIHSL

SEQ ID NO: 153453 - protein, 8 aa, Homo Sapiens
FADISNLL

SEQ ID NO: 153454 - protein, 8 aa, Homo Sapiens
FADKETLI

SEQ ID NO: 153455 - protein, 8 aa, Homo Sapiens
FADKHIQV

SEQ ID NO: 153456 - protein, 8 aa, Homo Sapiens
FADNVSGL

SEQ ID NO: 153457 - protein, 8 aa, Homo Sapiens
FADSSYLL

SEQ ID NO: 153458 - protein, 8 aa, Homo Sapiens
FADVSVKF

SEQ ID NO: 153459 - protein, 8 aa, Homo Sapiens
FADYVSTM

SEQ ID NO: 153460 - protein, 8 aa, Homo Sapiens
FAEENGLL

SEQ ID NO: 153461 - protein, 8 aa, Homo Sapiens
FAERVTSL

SEQ ID NO: 153462 - protein, 8 aa, Homo Sapiens
FFDGAKDV

SEQ ID NO: 153463 - protein, 8 aa, Homo Sapiens
FFDSSVEL

SEQ ID NO: 153464 - protein, 8 aa, Homo Sapiens
FGDISERL

SEQ ID NO: 153465 - protein, 8 aa, Homo Sapiens
FGDKDSKL

SEQ ID NO: 153466 - protein, 8 aa, Homo Sapiens
FGDSEPEL

SEQ ID NO: 153467 - protein, 8 aa, Homo Sapiens
FGDSPLAL

SEQ ID NO: 153468 - protein, 8 aa, Homo Sapiens
FGDVSSRL

SEQ ID NO: 153469 - protein, 8 aa, Homo Sapiens
FGDYNKEV

SEQ ID NO: 153470 - protein, 8 aa, Homo Sapiens
FIDEQQIL

SEQ ID NO: 153471 - protein, 8 aa, Homo Sapiens
FIDFGLDL

SEQ ID NO: 153472 - protein, 8 aa, Homo Sapiens
FIDGGGSV

SEQ ID NO: 153473 - protein, 8 aa, Homo Sapiens
FIDGPLAL

SEQ ID NO: 153474 - protein, 8 aa, Homo Sapiens
FIDKNNDL

SEQ ID NO: 153475 - protein, 8 aa, Homo Sapiens
FIDKNTQL

SEQ ID NO: 153476 - protein, 8 aa, Homo Sapiens
FIDKPVCF

SEQ ID NO: 153477 - protein, 8 aa, Homo Sapiens
FIDKQLEL

SEQ ID NO: 153478 - protein, 8 aa, Homo Sapiens
FIDKQTNL

SEQ ID NO: 153479 - protein, 8 aa, Homo Sapiens
FIDPSSGL

SEQ ID NO: 153480 - protein, 8 aa, Homo Sapiens
FIDQSQSL

SEQ ID NO: 153481 - protein, 8 aa, Homo Sapiens
FITDPVVL

SEQ ID NO: 153482 - protein, 8 aa, Homo Sapiens
FLDDITQL

SEQ ID NO: 153483 - protein, 8 aa, Homo Sapiens
FLDEEVKL

SEQ ID NO: 153484 - protein, 8 aa, Homo Sapiens
FLDGMTEL

SEQ ID NO: 153485 - protein, 8 aa, Homo Sapiens
FLDGQAVL

SEQ ID NO: 153486 - protein, 8 aa, Homo Sapiens
FLDKALEL

SEQ ID NO: 153487 - protein, 8 aa, Homo Sapiens
FLDLARNI

SEQ ID NO: 153488 - protein, 8 aa, Homo Sapiens
FLDNPGIL

SEQ ID NO: 153489 - protein, 8 aa, Homo Sapiens
FLDSMATL

SEQ ID NO: 153490 - protein, 8 aa, Homo Sapiens
FLDVENEL

SEQ ID NO: 153491 - protein, 8 aa, Homo Sapiens
FLDVVSKL

SEQ ID NO: 153492 - protein, 8 aa, Homo Sapiens
FLDYGENL

SEQ ID NO: 153493 - protein, 8 aa, Homo Sapiens
FLEDPSVL

SEQ ID NO: 153494 - protein, 8 aa, Homo Sapiens
FMDPASAL

SEQ ID NO: 153495 - protein, 8 aa, Homo Sapiens
FQDKASEL

SEQ ID NO: 153496 - protein, 8 aa, Homo Sapiens
FQDLIREL

SEQ ID NO: 153497 - protein, 8 aa, Homo Sapiens
FSDGAVSL

SEQ ID NO: 153498 - protein, 8 aa, Homo Sapiens
FSDGDAKL

SEQ ID NO: 153499 - protein, 8 aa, Homo Sapiens
FSDGITSV

SEQ ID NO: 153500 - protein, 8 aa, Homo Sapiens
FSDISEKL

SEQ ID NO: 153501 - protein, 8 aa, Homo Sapiens
FSDLTSQL

SEQ ID NO: 153502 - protein, 8 aa, Homo Sapiens
FSDNPLGL

SEQ ID NO: 153503 - protein, 8 aa, Homo Sapiens
FSDQRSEL

SEQ ID NO: 153504 - protein, 8 aa, Homo Sapiens
FSDQSPTL

SEQ ID NO: 153505 - protein, 8 aa, Homo Sapiens
FSDSHNAL

SEQ ID NO: 153506 - protein, 8 aa, Homo Sapiens
FSDVLPVL

SEQ ID NO: 153507 - protein, 8 aa, Homo Sapiens
FSDVSIDF

SEQ ID NO: 153508 - protein, 8 aa, Homo Sapiens
FSEVADFL

SEQ ID NO: 153509 - protein, 8 aa, Homo Sapiens
FSPVGSVL

SEQ ID NO: 153510 - protein, 8 aa, Homo Sapiens
FSSNPISL

SEQ ID NO: 153511 - protein, 8 aa, Homo Sapiens
FTDGSVTL

SEQ ID NO: 153512 - protein, 8 aa, Homo Sapiens
FTDLSSRF

SEQ ID NO: 153513 - protein, 8 aa, Homo Sapiens
FTDNSKAV

SEQ ID NO: 153514 - protein, 8 aa, Homo Sapiens
FTDTPLQI

SEQ ID NO: 153515 - protein, 8 aa, Homo Sapiens
FTDVSIVM

SEQ ID NO: 153516 - protein, 8 aa, Homo Sapiens
FVDAGNAF

SEQ ID NO: 153517 - protein, 8 aa, Homo Sapiens
FVDAITEL

SEQ ID NO: 153518 - protein, 8 aa, Homo Sapiens
FVDDETKL

SEQ ID NO: 153519 - protein, 8 aa, Homo Sapiens
FVDDGIDL

SEQ ID NO: 153520 - protein, 8 aa, Homo Sapiens
FVDGVSTV

SEQ ID NO: 153521 - protein, 8 aa, Homo Sapiens
FVDPNRSP

SEQ ID NO: 153522 - protein, 8 aa, Homo Sapiens
FVDQFVEL

SEQ ID NO: 153523 - protein, 8 aa, Homo Sapiens
FVDSVGVM

SEQ ID NO: 153524 - protein, 8 aa, Homo Sapiens
FVDTVVAL

SEQ ID NO: 153525 - protein, 8 aa, Homo Sapiens
FWDPSPQL

SEQ ID NO: 153526 - protein, 8 aa, Homo Sapiens
GDDAPRAV

SEQ ID NO: 153527 - protein, 8 aa, Homo Sapiens
GFDRSTSL

SEQ ID NO: 153528 - protein, 8 aa, Homo Sapiens
GIDRPAEL

SEQ ID NO: 153529 - protein, 8 aa, Homo Sapiens
GQDFSLDL

SEQ ID NO: 153530 - protein, 8 aa, Homo Sapiens
GSDTGASL

SEQ ID NO: 153531 - protein, 8 aa, Homo Sapiens
HADSVTGL

SEQ ID NO: 153532 - protein, 8 aa, Homo Sapiens
HADVAQLL

SEQ ID NO: 153533 - protein, 8 aa, Homo Sapiens
HADVGKEL

SEQ ID NO: 153534 - protein, 8 aa, Homo Sapiens
HGDSAMHL

SEQ ID NO: 153535 - protein, 8 aa, Homo Sapiens
HGDTALHV

SEQ ID NO: 153536 - protein, 8 aa, Homo Sapiens
HIDPSGKL

SEQ ID NO: 153537 - protein, 8 aa, Homo Sapiens
HIDSHEAL

SEQ ID NO: 153538 - protein, 8 aa, Homo Sapiens
HLDATTVL

SEQ ID NO: 153539 - protein, 8 aa, Homo Sapiens
HLDTHSGL

SEQ ID NO: 153540 - protein, 8 aa, Homo Sapiens
HPDYNNEL

SEQ ID NO: 153541 - protein, 8 aa, Homo Sapiens
HQDEAVVL

SEQ ID NO: 153542 - protein, 8 aa, Homo Sapiens
HSDGNLCV

SEQ ID NO: 153543 - protein, 8 aa, Homo Sapiens
HSDGSVSL

SEQ ID NO: 153544 - protein, 8 aa, Homo Sapiens
HSDNPSQL

SEQ ID NO: 153545 - protein, 8 aa, Homo Sapiens
HVDAHATL

SEQ ID NO: 153546 - protein, 8 aa, Homo Sapiens
HWDTTQSL

SEQ ID NO: 153547 - protein, 8 aa, Homo Sapiens
IADFFTEL

SEQ ID NO: 153548 - protein, 8 aa, Homo Sapiens
IADFGLAL

SEQ ID NO: 153549 - protein, 8 aa, Homo Sapiens
IADFGWSV

SEQ ID NO: 153550 - protein, 8 aa, Homo Sapiens
IADFQDVL

SEQ ID NO: 153551 - protein, 8 aa, Homo Sapiens
IADLAHLL

SEQ ID NO: 153552 - protein, 8 aa, Homo Sapiens
IADLALQM

SEQ ID NO: 153553 - protein, 8 aa, Homo Sapiens
IADLQQKL

SEQ ID NO: 153554 - protein, 8 aa, Homo Sapiens
IADLVVAV

SEQ ID NO: 153555 - protein, 8 aa, Homo Sapiens
IADQITLL

SEQ ID NO: 153556 - protein, 8 aa, Homo Sapiens
IADRHGGL

SEQ ID NO: 153557 - protein, 8 aa, Homo Sapiens
IADRPLYL

SEQ ID NO: 153558 - protein, 8 aa, Homo Sapiens
IADRSQVL

SEQ ID NO: 153559 - protein, 8 aa, Homo Sapiens
IADSFQVI

SEQ ID NO: 153560 - protein, 8 aa, Homo Sapiens
IADSHQNF

SEQ ID NO: 153561 - protein, 8 aa, Homo Sapiens
IADTGANV

SEQ ID NO: 153562 - protein, 8 aa, Homo Sapiens
IADTSNML

SEQ ID NO: 153563 - protein, 8 aa, Homo Sapiens
IADVSTGL

SEQ ID NO: 153564 - protein, 8 aa, Homo Sapiens
IADVSVQM

SEQ ID NO: 153565 - protein, 8 aa, Homo Sapiens
IDDRNREL

SEQ ID NO: 153566 - protein, 8 aa, Homo Sapiens
IFDEAEKL

SEQ ID NO: 153567 - protein, 8 aa, Homo Sapiens
IFDEGHML

SEQ ID NO: 153568 - protein, 8 aa, Homo Sapiens
IFDIATEL

SEQ ID NO: 153569 - protein, 8 aa, Homo Sapiens
IFDLSEVL

SEQ ID NO: 153570 - protein, 8 aa, Homo Sapiens
IFSEHSCL

SEQ ID NO: 153571 - protein, 8 aa, Homo Sapiens
IGDPNLEF

SEQ ID NO: 153572 - protein, 8 aa, Homo Sapiens
IGDTSGHF

SEQ ID NO: 153573 - protein, 8 aa, Homo Sapiens
IIDESHFL

SEQ ID NO: 153574 - protein, 8 aa, Homo Sapiens
IIDGTSEM

SEQ ID NO: 153575 - protein, 8 aa, Homo Sapiens
IIDKEVSL

SEQ ID NO: 153576 - protein, 8 aa, Homo Sapiens
IIDNHITL

SEQ ID NO: 153577 - protein, 8 aa, Homo Sapiens
IIDPGSTV

SEQ ID NO: 153578 - protein, 8 aa, Homo Sapiens
IIDSGPQL

SEQ ID NO: 153579 - protein, 8 aa, Homo Sapiens
IIDTPGIL

SEQ ID NO: 153580 - protein, 8 aa, Homo Sapiens
ILDEAVEL

SEQ ID NO: 153581 - protein, 8 aa, Homo Sapiens
ILDEGHAI

SEQ ID NO: 153582 - protein, 8 aa, Homo Sapiens
ILDESHSI

SEQ ID NO: 153583 - protein, 8 aa, Homo Sapiens
ILDFETAL

SEQ ID NO: 153584 - protein, 8 aa, Homo Sapiens
ILDNADVL

SEQ ID NO: 153585 - protein, 8 aa, Homo Sapiens
ILDVAQDL

SEQ ID NO: 153586 - protein, 8 aa, Homo Sapiens
IMDPAQYV

SEQ ID NO: 153587 - protein, 8 aa, Homo Sapiens
IQDGSLDL

SEQ ID NO: 153588 - protein, 8 aa, Homo Sapiens
IQDKSEEL

SEQ ID NO: 153589 - protein, 8 aa, Homo Sapiens
ISDKDLEL

SEQ ID NO: 153590 - protein, 8 aa, Homo Sapiens
ISDKDQQL

SEQ ID NO: 153591 - protein, 8 aa, Homo Sapiens
ISDLNELL

SEQ ID NO: 153592 - protein, 8 aa, Homo Sapiens
ISDSNPFL

SEQ ID NO: 153593 - protein, 8 aa, Homo Sapiens
ISDVHFSV

SEQ ID NO: 153594 - protein, 8 aa, Homo Sapiens
ISDYAVKI

SEQ ID NO: 153595 - protein, 8 aa, Homo Sapiens
ITDFDMTL

SEQ ID NO: 153596 - protein, 8 aa, Homo Sapiens
ITDGMRSV

SEQ ID NO: 153597 - protein, 8 aa, Homo Sapiens
ITDIISAL

SEQ ID NO: 153598 - protein, 8 aa, Homo Sapiens
ITDLISEL

SEQ ID NO: 153599 - protein, 8 aa, Homo Sapiens
ITDLPIKL

SEQ ID NO: 153600 - protein, 8 aa, Homo Sapiens
ITDLQNQL

SEQ ID NO: 153601 - protein, 8 aa, Homo Sapiens
ITDMLTEL

SEQ ID NO: 153602 - protein, 8 aa, Homo Sapiens
ITDSPVVV

SEQ ID NO: 153603 - protein, 8 aa, Homo Sapiens
ITDVSWRL

SEQ ID NO: 153604 - protein, 8 aa, Homo Sapiens
ITIDTSYL

SEQ ID NO: 153605 - protein, 8 aa, Homo Sapiens
IVDANLSV

SEQ ID NO: 153606 - protein, 8 aa, Homo Sapiens
IVDEALGL

SEQ ID NO: 153607 - protein, 8 aa, Homo Sapiens
IVDEASQI

SEQ ID NO: 153608 - protein, 8 aa, Homo Sapiens
IVDEGALL

SEQ ID NO: 153609 - protein, 8 aa, Homo Sapiens
IVDGNHRL

SEQ ID NO: 153610 - protein, 8 aa, Homo Sapiens
IVDGNLKL

SEQ ID NO: 153611 - protein, 8 aa, Homo Sapiens
IVDPAREL

SEQ ID NO: 153612 - protein, 8 aa, Homo Sapiens
IVDPSNTL

SEQ ID NO: 153613 - protein, 8 aa, Homo Sapiens
IVDRPVTL

SEQ ID NO: 153614 - protein, 8 aa, Homo Sapiens
IVDTGIGM

SEQ ID NO: 153615 - protein, 8 aa, Homo Sapiens
IWDGSEVL

SEQ ID NO: 153616 - protein, 8 aa, Homo Sapiens
KADCTITM

SEQ ID NO: 153617 - protein, 8 aa, Homo Sapiens
KADEGISF

SEQ ID NO: 153618 - protein, 8 aa, Homo Sapiens
KADGETIL

SEQ ID NO: 153619 - protein, 8 aa, Homo Sapiens
KADIGVAM

SEQ ID NO: 153620 - protein, 8 aa, Homo Sapiens
KADKVTML

SEQ ID NO: 153621 - protein, 8 aa, Homo Sapiens
KADNVVNI

SEQ ID NO: 153622 - protein, 8 aa, Homo Sapiens
KCQPPRGL

SEQ ID NO: 153623 - protein, 8 aa, Homo Sapiens
KGDRAGVL

SEQ ID NO: 153624 - protein, 8 aa, Homo Sapiens
KMDESTLL

SEQ ID NO: 153625 - protein, 8 aa, Homo Sapiens
KQDQSPSL

SEQ ID NO: 153626 - protein, 8 aa, Homo Sapiens
KSDIYLNL

SEQ ID NO: 153627 - protein, 8 aa, Homo Sapiens
KSDLHPTL

SEQ ID NO: 153628 - protein, 8 aa, Homo Sapiens
KSDQSYVI

SEQ ID NO: 153629 - protein, 8 aa, Homo Sapiens
LADAVTWL

SEQ ID NO: 153630 - protein, 8 aa, Homo Sapiens
LADAVVKI

SEQ ID NO: 153631 - protein, 8 aa, Homo Sapiens
LADDHDVL

SEQ ID NO: 153632 - protein, 8 aa, Homo Sapiens
LADFAELI

SEQ ID NO: 153633 - protein, 8 aa, Homo Sapiens
LADGSSRL

SEQ ID NO: 153634 - protein, 8 aa, Homo Sapiens
LADIAQKL

SEQ ID NO: 153635 - protein, 8 aa, Homo Sapiens
LADKGAKL

SEQ ID NO: 153636 - protein, 8 aa, Homo Sapiens
LADLPQQL

SEQ ID NO: 153637 - protein, 8 aa, Homo Sapiens
LADPGAVA

SEQ ID NO: 153638 - protein, 8 aa, Homo Sapiens
LADQCTGL

SEQ ID NO: 153639 - protein, 8 aa, Homo Sapiens
LADQEVRL

SEQ ID NO: 153640 - protein, 8 aa, Homo Sapiens
LADVGSFL

SEQ ID NO: 153641 - protein, 8 aa, Homo Sapiens
LADVHIEV

SEQ ID NO: 153642 - protein, 8 aa, Homo Sapiens
LADVTNAL

SEQ ID NO: 153643 - protein, 8 aa, Homo Sapiens
LDVPTAAV

SEQ ID NO: 153644 - protein, 8 aa, Homo Sapiens
LFDAVSSL

SEQ ID NO: 153645 - protein, 8 aa, Homo Sapiens
LFDQANKL

SEQ ID NO: 153646 - protein, 8 aa, Homo Sapiens
LFDSLSTL

SEQ ID NO: 153647 - protein, 8 aa, Homo Sapiens
LFDTAISL

SEQ ID NO: 153648 - protein, 8 aa, Homo Sapiens
LGDKHATL

SEQ ID NO: 153649 - protein, 8 aa, Homo Sapiens
LGDPASAL

SEQ ID NO: 153650 - protein, 8 aa, Homo Sapiens
LIDMGSSL

SEQ ID NO: 153651 - protein, 8 aa, Homo Sapiens
LIDSSRVL

SEQ ID NO: 153652 - protein, 8 aa, Homo Sapiens
LLDLHSYL

SEQ ID NO: 153653 - protein, 8 aa, Homo Sapiens
LLDPNTTL

SEQ ID NO: 153654 - protein, 8 aa, Homo Sapiens
LLDSCTKL

SEQ ID NO: 153655 - protein, 8 aa, Homo Sapiens
LPDGGSCL

SEQ ID NO: 153656 - protein, 8 aa, Homo Sapiens
LQDLATQL

SEQ ID NO: 153657 - protein, 8 aa, Homo Sapiens
LQDVNREL

SEQ ID NO: 153658 - protein, 8 aa, Homo Sapiens
LSDGIQEL

SEQ ID NO: 153659 - protein, 8 aa, Homo Sapiens
LSDGNPSL

SEQ ID NO: 153660 - protein, 8 aa, Homo Sapiens
LSDGVAVL

SEQ ID NO: 153661 - protein, 8 aa, Homo Sapiens
LSDLENIL

SEQ ID NO: 153662 - protein, 8 aa, Homo Sapiens
LSDLSTKL

SEQ ID NO: 153663 - protein, 8 aa, Homo Sapiens
LSDPSLDM

SEQ ID NO: 153664 - protein, 8 aa, Homo Sapiens
LSDPSQDL

SEQ ID NO: 153665 - protein, 8 aa, Homo Sapiens
LSDPSSRL

SEQ ID NO: 153666 - protein, 8 aa, Homo Sapiens
LSDVAEKL

SEQ ID NO: 153667 - protein, 8 aa, Homo Sapiens
LSDYGYHL

SEQ ID NO: 153668 - protein, 8 aa, Homo Sapiens
LTDEFREL

SEQ ID NO: 153669 - protein, 8 aa, Homo Sapiens
LTDEQVAL

SEQ ID NO: 153670 - protein, 8 aa, Homo Sapiens
LTDHHESL

SEQ ID NO: 153671 - protein, 8 aa, Homo Sapiens
LTDICTQL

SEQ ID NO: 153672 - protein, 8 aa, Homo Sapiens
LTDPSQRL

SEQ ID NO: 153673 - protein, 8 aa, Homo Sapiens
LTDPSTQL

SEQ ID NO: 153674 - protein, 8 aa, Homo Sapiens
LTDTDAAI

SEQ ID NO: 153675 - protein, 8 aa, Homo Sapiens
LTNTNRAL

SEQ ID NO: 153676 - protein, 8 aa, Homo Sapiens
LTVTDLEI

SEQ ID NO: 153677 - protein, 8 aa, Homo Sapiens
LVDCSVAL

SEQ ID NO: 153678 - protein, 8 aa, Homo Sapiens
LVDIGETL

SEQ ID NO: 153679 - protein, 8 aa, Homo Sapiens
LVDQSAAL

SEQ ID NO: 153680 - protein, 8 aa, Homo Sapiens
LVDTTVEL

SEQ ID NO: 153681 - protein, 8 aa, Homo Sapiens
MADSGESL

SEQ ID NO: 153682 - protein, 8 aa, Homo Sapiens
MFDFSEKL

SEQ ID NO: 153683 - protein, 8 aa, Homo Sapiens
MLDVAEEL

SEQ ID NO: 153684 - protein, 8 aa, Homo Sapiens
MPDSAAAL

SEQ ID NO: 153685 - protein, 8 aa, Homo Sapiens
MSDLPVKV

SEQ ID NO: 153686 - protein, 8 aa, Homo Sapiens
MTDPNVAL

SEQ ID NO: 153687 - protein, 8 aa, Homo Sapiens
MVDLNDYL

SEQ ID NO: 153688 - protein, 8 aa, Homo Sapiens
MVDVGSLL

SEQ ID NO: 153689 - protein, 8 aa, Homo Sapiens
NADCVVVL

SEQ ID NO: 153690 - protein, 8 aa, Homo Sapiens
NADEARSL

SEQ ID NO: 153691 - protein, 8 aa, Homo Sapiens
NADIGLRL

SEQ ID NO: 153692 - protein, 8 aa, Homo Sapiens
NADISQSL

SEQ ID NO: 153693 - protein, 8 aa, Homo Sapiens
NADIVTLL

SEQ ID NO: 153694 - protein, 8 aa, Homo Sapiens
NADKVLEL

SEQ ID NO: 153695 - protein, 8 aa, Homo Sapiens
NADLSITL

SEQ ID NO: 153696 - protein, 8 aa, Homo Sapiens
NADQPLRV

SEQ ID NO: 153697 - protein, 8 aa, Homo Sapiens
NADSGVHL

SEQ ID NO: 153698 - protein, 8 aa, Homo Sapiens
NADTGTKL

SEQ ID NO: 153699 - protein, 8 aa, Homo Sapiens
NADTTRNL

SEQ ID NO: 153700 - protein, 8 aa, Homo Sapiens
NADVHASL

SEQ ID NO: 153701 - protein, 8 aa, Homo Sapiens
NADVQERL

SEQ ID NO: 153702 - protein, 8 aa, Homo Sapiens
NADVVNVL

SEQ ID NO: 153703 - protein, 8 aa, Homo Sapiens
NADWPAGL

SEQ ID NO: 153704 - protein, 8 aa, Homo Sapiens
NAESNAEL

SEQ ID NO: 153705 - protein, 8 aa, Homo Sapiens
NFDGSSTL

SEQ ID NO: 153706 - protein, 8 aa, Homo Sapiens
NFDNSPVL

SEQ ID NO: 153707 - protein, 8 aa, Homo Sapiens
NIDTSSDL

SEQ ID NO: 153708 - protein, 8 aa, Homo Sapiens
NQDPANIL

SEQ ID NO: 153709 - protein, 8 aa, Homo Sapiens
NSDLSEKL

SEQ ID NO: 153710 - protein, 8 aa, Homo Sapiens
NSDPTNVL

SEQ ID NO: 153711 - protein, 8 aa, Homo Sapiens
NSDRSIPM

SEQ ID NO: 153712 - protein, 8 aa, Homo Sapiens
NSDVSGSF

SEQ ID NO: 153713 - protein, 8 aa, Homo Sapiens
NTDEMVEL

SEQ ID NO: 153714 - protein, 8 aa, Homo Sapiens
NTDPSIVM

SEQ ID NO: 153715 - protein, 8 aa, Homo Sapiens
NTDVPLVL

SEQ ID NO: 153716 - protein, 8 aa, Homo Sapiens
NWDIAHMI

SEQ ID NO: 153717 - protein, 8 aa, Homo Sapiens
PINGNGKQ

SEQ ID NO: 153718 - protein, 8 aa, Homo Sapiens
PVDISTAM

SEQ ID NO: 153719 - protein, 8 aa, Homo Sapiens
QADCAVLI

SEQ ID NO: 153720 - protein, 8 aa, Homo Sapiens
QADLAYQL

SEQ ID NO: 153721 - protein, 8 aa, Homo Sapiens
QEDPNAVL

SEQ ID NO: 153722 - protein, 8 aa, Homo Sapiens
QFDVATHL

SEQ ID NO: 153723 - protein, 8 aa, Homo Sapiens
QSEPSGHI

SEQ ID NO: 153724 - protein, 8 aa, Homo Sapiens
RADEHIAL

SEQ ID NO: 153725 - protein, 8 aa, Homo Sapiens
RADRPSSL

SEQ ID NO: 153726 - protein, 8 aa, Homo Sapiens
REVVNTEL

SEQ ID NO: 153727 - protein, 8 aa, Homo Sapiens
RIDEFEAL

SEQ ID NO: 153728 - protein, 8 aa, Homo Sapiens
RSDSYVEL

SEQ ID NO: 153729 - protein, 8 aa, Homo Sapiens
RSDTPAML

SEQ ID NO: 153730 - protein, 8 aa, Homo Sapiens
RTDLNPIL

SEQ ID NO: 153731 - protein, 8 aa, Homo Sapiens
RVDSPVTV

SEQ ID NO: 153732 - protein, 8 aa, Homo Sapiens
SADATRCL

SEQ ID NO: 153733 - protein, 8 aa, Homo Sapiens
SADEANVL

SEQ ID NO: 153734 - protein, 8 aa, Homo Sapiens
SADEPMTT

SEQ ID NO: 153735 - protein, 8 aa, Homo Sapiens
SADFHVDL

SEQ ID NO: 153736 - protein, 8 aa, Homo Sapiens
SADFKTEL

SEQ ID NO: 153737 - protein, 8 aa, Homo Sapiens
SADFSSML

SEQ ID NO: 153738 - protein, 8 aa, Homo Sapiens
SADGHSIL

SEQ ID NO: 153739 - protein, 8 aa, Homo Sapiens
SADGHTML

SEQ ID NO: 153740 - protein, 8 aa, Homo Sapiens
SADGIVRI

SEQ ID NO: 153741 - protein, 8 aa, Homo Sapiens
SADGSPAL

SEQ ID NO: 153742 - protein, 8 aa, Homo Sapiens
SADGTVRI

SEQ ID NO: 153743 - protein, 8 aa, Homo Sapiens
SADHCVQL

SEQ ID NO: 153744 - protein, 8 aa, Homo Sapiens
SADKFQVL

SEQ ID NO: 153745 - protein, 8 aa, Homo Sapiens
SADKGGFL

SEQ ID NO: 153746 - protein, 8 aa, Homo Sapiens
SADKNFYL

SEQ ID NO: 153747 - protein, 8 aa, Homo Sapiens
SADKTVKL

SEQ ID NO: 153748 - protein, 8 aa, Homo Sapiens
SADLEATL

SEQ ID NO: 153749 - protein, 8 aa, Homo Sapiens
SADLVAQL

SEQ ID NO: 153750 - protein, 8 aa, Homo Sapiens
SADNAFHL

SEQ ID NO: 153751 - protein, 8 aa, Homo Sapiens
SADNSCRL

SEQ ID NO: 153752 - protein, 8 aa, Homo Sapiens
SADTAATL

SEQ ID NO: 153753 - protein, 8 aa, Homo Sapiens
SADTDILL

SEQ ID NO: 153754 - protein, 8 aa, Homo Sapiens
SDDIPHAL

SEQ ID NO: 153755 - protein, 8 aa, Homo Sapiens
SDFGGRSL

SEQ ID NO: 153756 - protein, 8 aa, Homo Sapiens
SDHAPHTL

SEQ ID NO: 153757 - protein, 8 aa, Homo Sapiens
SFDESLAL

SEQ ID NO: 153758 - protein, 8 aa, Homo Sapiens
SGDEMTSL

SEQ ID NO: 153759 - protein, 8 aa, Homo Sapiens
SGDINTSI

SEQ ID NO: 153760 - protein, 8 aa, Homo Sapiens
SGDPGPAL

SEQ ID NO: 153761 - protein, 8 aa, Homo Sapiens
SGDVSGKL

SEQ ID NO: 153762 - protein, 8 aa, Homo Sapiens
SIDAVEPL

SEQ ID NO: 153763 - protein, 8 aa, Homo Sapiens
SIDLNWDL

SEQ ID NO: 153764 - protein, 8 aa, Homo Sapiens
SLDEVVLL

SEQ ID NO: 153765 - protein, 8 aa, Homo Sapiens
SLDFGGHL

SEQ ID NO: 153766 - protein, 8 aa, Homo Sapiens
SLDQHTSL

SEQ ID NO: 153767 - protein, 8 aa, Homo Sapiens
SLDSPVLL

SEQ ID NO: 153768 - protein, 8 aa, Homo Sapiens
SNDVATLL

SEQ ID NO: 153769 - protein, 8 aa, Homo Sapiens
SQDFSSYL

SEQ ID NO: 153770 - protein, 8 aa, Homo Sapiens
SQDINSHL

SEQ ID NO: 153771 - protein, 8 aa, Homo Sapiens
SQDVHVVL

SEQ ID NO: 153772 - protein, 8 aa, Homo Sapiens
SSDDANVL

SEQ ID NO: 153773 - protein, 8 aa, Homo Sapiens
SSDEAVIL

SEQ ID NO: 153774 - protein, 8 aa, Homo Sapiens
SSDLPQVL

SEQ ID NO: 153775 - protein, 8 aa, Homo Sapiens
SSDLPVAL

SEQ ID NO: 153776 - protein, 8 aa, Homo Sapiens
SSDQPLTV

SEQ ID NO: 153777 - protein, 8 aa, Homo Sapiens
SSDSPTTL

SEQ ID NO: 153778 - protein, 8 aa, Homo Sapiens
SSDVNLEL

SEQ ID NO: 153779 - protein, 8 aa, Homo Sapiens
SSDVSERL

SEQ ID NO: 153780 - protein, 8 aa, Homo Sapiens
STDENLIL

SEQ ID NO: 153781 - protein, 8 aa, Homo Sapiens
STDISAVL

SEQ ID NO: 153782 - protein, 8 aa, Homo Sapiens
STDPNSVF

SEQ ID NO: 153783 - protein, 8 aa, Homo Sapiens
STDTCYVL

SEQ ID NO: 153784 - protein, 8 aa, Homo Sapiens
STDYGNFL

SEQ ID NO: 153785 - protein, 8 aa, Homo Sapiens
SVDANTKL

SEQ ID NO: 153786 - protein, 8 aa, Homo Sapiens
SVDEQNAL

SEQ ID NO: 153787 - protein, 8 aa, Homo Sapiens
SVDISHTL

SEQ ID NO: 153788 - protein, 8 aa, Homo Sapiens
SVDKGECL

SEQ ID NO: 153789 - protein, 8 aa, Homo Sapiens
SVDKVLEL

SEQ ID NO: 153790 - protein, 8 aa, Homo Sapiens
SVDLGPTL

SEQ ID NO: 153791 - protein, 8 aa, Homo Sapiens
SVDQPLKI

SEQ ID NO: 153792 - protein, 8 aa, Homo Sapiens
SVDTARTL

SEQ ID NO: 153793 - protein, 8 aa, Homo Sapiens
SWDESLSL

SEQ ID NO: 153794 - protein, 8 aa, Homo Sapiens
TADAHHYL

SEQ ID NO: 153795 - protein, 8 aa, Homo Sapiens
TADEIVKL

SEQ ID NO: 153796 - protein, 8 aa, Homo Sapiens
TADICQML

SEQ ID NO: 153797 - protein, 8 aa, Homo Sapiens
TADIGCVL

SEQ ID NO: 153798 - protein, 8 aa, Homo Sapiens
TADISSHF

SEQ ID NO: 153799 - protein, 8 aa, Homo Sapiens
TADITHAL

SEQ ID NO: 153800 - protein, 8 aa, Homo Sapiens
TADSSHYL

SEQ ID NO: 153801 - protein, 8 aa, Homo Sapiens
TADVNSGF

SEQ ID NO: 153802 - protein, 8 aa, Homo Sapiens
TDHNLHEL

SEQ ID NO: 153803 - protein, 8 aa, Homo Sapiens
TFDVHLDL

SEQ ID NO: 153804 - protein, 8 aa, Homo Sapiens
TGDFGGNL

SEQ ID NO: 153805 - protein, 8 aa, Homo Sapiens
TIDEIQKL

SEQ ID NO: 153806 - protein, 8 aa, Homo Sapiens
TIDGPLCL

SEQ ID NO: 153807 - protein, 8 aa, Homo Sapiens
TIDGPSKV

SEQ ID NO: 153808 - protein, 8 aa, Homo Sapiens
TIDKNTKI

SEQ ID NO: 153809 - protein, 8 aa, Homo Sapiens
TIDKVSVL

SEQ ID NO: 153810 - protein, 8 aa, Homo Sapiens
TIDPSHPM

SEQ ID NO: 153811 - protein, 8 aa, Homo Sapiens
TIDPSNPM

SEQ ID NO: 153812 - protein, 8 aa, Homo Sapiens
TIDTDTLL

SEQ ID NO: 153813 - protein, 8 aa, Homo Sapiens
TIDVTDFL

SEQ ID NO: 153814 - protein, 8 aa, Homo Sapiens
TNDAATIL

SEQ ID NO: 153815 - protein, 8 aa, Homo Sapiens
TNDISHYL

SEQ ID NO: 153816 - protein, 8 aa, Homo Sapiens
TQDLGNDL

SEQ ID NO: 153817 - protein, 8 aa, Homo Sapiens
TSDFNTFL

SEQ ID NO: 153818 - protein, 8 aa, Homo Sapiens
TSDLHFQV

SEQ ID NO: 153819 - protein, 8 aa, Homo Sapiens
TSDPAEVL

SEQ ID NO: 153820 - protein, 8 aa, Homo Sapiens
TSDPAQHL

SEQ ID NO: 153821 - protein, 8 aa, Homo Sapiens
TSDQPILL

SEQ ID NO: 153822 - protein, 8 aa, Homo Sapiens
TSDVGATL

SEQ ID NO: 153823 - protein, 8 aa, Homo Sapiens
TSDWPTVL

SEQ ID NO: 153824 - protein, 8 aa, Homo Sapiens
TTDAAQTL

SEQ ID NO: 153825 - protein, 8 aa, Homo Sapiens
TTDISIDL

SEQ ID NO: 153826 - protein, 8 aa, Homo Sapiens
TTDLGRSL

SEQ ID NO: 153827 - protein, 8 aa, Homo Sapiens
TVDLSSHL

SEQ ID NO: 153828 - protein, 8 aa, Homo Sapiens
TVDMNIAL

SEQ ID NO: 153829 - protein, 8 aa, Homo Sapiens
VADAGAFL

SEQ ID NO: 153830 - protein, 8 aa, Homo Sapiens
VADDPIVM

SEQ ID NO: 153831 - protein, 8 aa, Homo Sapiens
VADFADKL

SEQ ID NO: 153832 - protein, 8 aa, Homo Sapiens
VADHGLTL

SEQ ID NO: 153833 - protein, 8 aa, Homo Sapiens
VADKDTVL

SEQ ID NO: 153834 - protein, 8 aa, Homo Sapiens
VADKFTEL

SEQ ID NO: 153835 - protein, 8 aa, Homo Sapiens
VADKHELL

SEQ ID NO: 153836 - protein, 8 aa, Homo Sapiens
VADLAESI

SEQ ID NO: 153837 - protein, 8 aa, Homo Sapiens
VADLAHVL

SEQ ID NO: 153838 - protein, 8 aa, Homo Sapiens
VADLHLYL

SEQ ID NO: 153839 - protein, 8 aa, Homo Sapiens
VADLQTRL

SEQ ID NO: 153840 - protein, 8 aa, Homo Sapiens
VADLSRSL

SEQ ID NO: 153841 - protein, 8 aa, Homo Sapiens
VADPDNPL

SEQ ID NO: 153842 - protein, 8 aa, Homo Sapiens
VADPGGSL

SEQ ID NO: 153843 - protein, 8 aa, Homo Sapiens
VADPGVTV

SEQ ID NO: 153844 - protein, 8 aa, Homo Sapiens
VADRFSEL

SEQ ID NO: 153845 - protein, 8 aa, Homo Sapiens
VADSGLTL

SEQ ID NO: 153846 - protein, 8 aa, Homo Sapiens
VADSKTLL

SEQ ID NO: 153847 - protein, 8 aa, Homo Sapiens
VADVEALL

SEQ ID NO: 153848 - protein, 8 aa, Homo Sapiens
VADYMRYL

SEQ ID NO: 153849 - protein, 8 aa, Homo Sapiens
VAEFHTEL

SEQ ID NO: 153850 - protein, 8 aa, Homo Sapiens
VDKSGRTL

SEQ ID NO: 153851 - protein, 8 aa, Homo Sapiens
VFDLAQTL

SEQ ID NO: 153852 - protein, 8 aa, Homo Sapiens
VFDLVRTL

SEQ ID NO: 153853 - protein, 8 aa, Homo Sapiens
VFDPHGTL

SEQ ID NO: 153854 - protein, 8 aa, Homo Sapiens
VFDSHPVL

SEQ ID NO: 153855 - protein, 8 aa, Homo Sapiens
VFDVGGLL

SEQ ID NO: 153856 - protein, 8 aa, Homo Sapiens
VGDEASEL

SEQ ID NO: 153857 - protein, 8 aa, Homo Sapiens
VGDLSPEI

SEQ ID NO: 153858 - protein, 8 aa, Homo Sapiens
VGDRSSNL

SEQ ID NO: 153859 - protein, 8 aa, Homo Sapiens
VGDVGQTV

SEQ ID NO: 153860 - protein, 8 aa, Homo Sapiens
VGDVNLFL

SEQ ID NO: 153861 - protein, 8 aa, Homo Sapiens
VGDVSLQL

SEQ ID NO: 153862 - protein, 8 aa, Homo Sapiens
VHDPAGAL

SEQ ID NO: 153863 - protein, 8 aa, Homo Sapiens
VIDAAVLL

SEQ ID NO: 153864 - protein, 8 aa, Homo Sapiens
VIDDAFAL

SEQ ID NO: 153865 - protein, 8 aa, Homo Sapiens
VIDECVEM

SEQ ID NO: 153866 - protein, 8 aa, Homo Sapiens
VIDEIISL

SEQ ID NO: 153867 - protein, 8 aa, Homo Sapiens
VIDEPVRL

SEQ ID NO: 153868 - protein, 8 aa, Homo Sapiens
VIDGVTVL

SEQ ID NO: 153869 - protein, 8 aa, Homo Sapiens
VIDICMKL

SEQ ID NO: 153870 - protein, 8 aa, Homo Sapiens
VIDLGEAF

SEQ ID NO: 153871 - protein, 8 aa, Homo Sapiens
VIDQNRAL

SEQ ID NO: 153872 - protein, 8 aa, Homo Sapiens
VIDSPGIL

SEQ ID NO: 153873 - protein, 8 aa, Homo Sapiens
VIDVAPEL

SEQ ID NO: 153874 - protein, 8 aa, Homo Sapiens
VIDVGSEW

SEQ ID NO: 153875 - protein, 8 aa, Homo Sapiens
VIDYSNAF

SEQ ID NO: 153876 - protein, 8 aa, Homo Sapiens
VLDAGPVL

SEQ ID NO: 153877 - protein, 8 aa, Homo Sapiens
VLDEADKL

SEQ ID NO: 153878 - protein, 8 aa, Homo Sapiens
VLDELSLL

SEQ ID NO: 153879 - protein, 8 aa, Homo Sapiens
VLDELVRP

SEQ ID NO: 153880 - protein, 8 aa, Homo Sapiens
VLDHFSEL

SEQ ID NO: 153881 - protein, 8 aa, Homo Sapiens
VLDIARQL

SEQ ID NO: 153882 - protein, 8 aa, Homo Sapiens
VLDNSGEW

SEQ ID NO: 153883 - protein, 8 aa, Homo Sapiens
VLDPNMDL

SEQ ID NO: 153884 - protein, 8 aa, Homo Sapiens
VLDSFGEL

SEQ ID NO: 153885 - protein, 8 aa, Homo Sapiens
VLDTNIQL

SEQ ID NO: 153886 - protein, 8 aa, Homo Sapiens
VLDTSDAL

SEQ ID NO: 153887 - protein, 8 aa, Homo Sapiens
VLDVSNSF

SEQ ID NO: 153888 - protein, 8 aa, Homo Sapiens
VMDEADRI

SEQ ID NO: 153889 - protein, 8 aa, Homo Sapiens
VMDVNTAL

SEQ ID NO: 153890 - protein, 8 aa, Homo Sapiens
VNDLTTAL

SEQ ID NO: 153891 - protein, 8 aa, Homo Sapiens
VQDLAKAV

SEQ ID NO: 153892 - protein, 8 aa, Homo Sapiens
VSDDPQVL

SEQ ID NO: 153893 - protein, 8 aa, Homo Sapiens
VSDEHSLF

SEQ ID NO: 153894 - protein, 8 aa, Homo Sapiens
VSDEYEQL

SEQ ID NO: 153895 - protein, 8 aa, Homo Sapiens
VSDIGKEL

SEQ ID NO: 153896 - protein, 8 aa, Homo Sapiens
VSDINFTL

SEQ ID NO: 153897 - protein, 8 aa, Homo Sapiens
VSDKDTGL

SEQ ID NO: 153898 - protein, 8 aa, Homo Sapiens
VSDLISVL

SEQ ID NO: 153899 - protein, 8 aa, Homo Sapiens
VSDMIMEL

SEQ ID NO: 153900 - protein, 8 aa, Homo Sapiens
VSDPGRCL

SEQ ID NO: 153901 - protein, 8 aa, Homo Sapiens
VSDPMNAL

SEQ ID NO: 153902 - protein, 8 aa, Homo Sapiens
VSDYEMKL

SEQ ID NO: 153903 - protein, 8 aa, Homo Sapiens
VSEESNVL

SEQ ID NO: 153904 - protein, 8 aa, Homo Sapiens
VTDAIVLL

SEQ ID NO: 153905 - protein, 8 aa, Homo Sapiens
VTDDGMAV

SEQ ID NO: 153906 - protein, 8 aa, Homo Sapiens
VTDDLVCL

SEQ ID NO: 153907 - protein, 8 aa, Homo Sapiens
VTDDPTQV

SEQ ID NO: 153908 - protein, 8 aa, Homo Sapiens
VTDRNITL

SEQ ID NO: 153909 - protein, 8 aa, Homo Sapiens
VTDVSLEL

SEQ ID NO: 153910 - protein, 8 aa, Homo Sapiens
VVDDTLEL

SEQ ID NO: 153911 - protein, 8 aa, Homo Sapiens
VVDESDKL

SEQ ID NO: 153912 - protein, 8 aa, Homo Sapiens
VVDHQTEL

SEQ ID NO: 153913 - protein, 8 aa, Homo Sapiens
VVDIVQEL

SEQ ID NO: 153914 - protein, 8 aa, Homo Sapiens
VVDQPLKL

SEQ ID NO: 153915 - protein, 8 aa, Homo Sapiens
WADEAEKA

SEQ ID NO: 153916 - protein, 8 aa, Homo Sapiens
WADVQSQL

SEQ ID NO: 153917 - protein, 8 aa, Homo Sapiens
WMDEAQAL

SEQ ID NO: 153918 - protein, 8 aa, Homo Sapiens
YADDNSLL

SEQ ID NO: 153919 - protein, 8 aa, Homo Sapiens
YADGESFL

SEQ ID NO: 153920 - protein, 8 aa, Homo Sapiens
YADGTWEL

SEQ ID NO: 153921 - protein, 8 aa, Homo Sapiens
YADIVDVL

SEQ ID NO: 153922 - protein, 8 aa, Homo Sapiens
YADIVQLL

SEQ ID NO: 153923 - protein, 8 aa, Homo Sapiens
YADLQDAL

SEQ ID NO: 153924 - protein, 8 aa, Homo Sapiens
YADLVKAL

SEQ ID NO: 153925 - protein, 8 aa, Homo Sapiens
YADRVKEL

SEQ ID NO: 153926 - protein, 8 aa, Homo Sapiens
YADTELLL

SEQ ID NO: 153927 - protein, 8 aa, Homo Sapiens
YADVQAVL

SEQ ID NO: 153928 - protein, 8 aa, Homo Sapiens
YAEGVRVL

SEQ ID NO: 153929 - protein, 8 aa, Homo Sapiens
YFDEPVEL

SEQ ID NO: 153930 - protein, 8 aa, Homo Sapiens
YGDKHITL

SEQ ID NO: 153931 - protein, 8 aa, Homo Sapiens
YGENSNSL

SEQ ID NO: 153932 - protein, 8 aa, Homo Sapiens
YIDKSTQL

SEQ ID NO: 153933 - protein, 8 aa, Homo Sapiens
YIDSSWEL

SEQ ID NO: 153934 - protein, 8 aa, Homo Sapiens
YIDVAVKL

SEQ ID NO: 153935 - protein, 8 aa, Homo Sapiens
YIDVQSII

SEQ ID NO: 153936 - protein, 8 aa, Homo Sapiens
YLDDWTVL

SEQ ID NO: 153937 - protein, 8 aa, Homo Sapiens
YLDEGFLL

SEQ ID NO: 153938 - protein, 8 aa, Homo Sapiens
YLDESNAL

SEQ ID NO: 153939 - protein, 8 aa, Homo Sapiens
YLDGEVEL

SEQ ID NO: 153940 - protein, 8 aa, Homo Sapiens
YLDINTVL

SEQ ID NO: 153941 - protein, 8 aa, Homo Sapiens
YLDKISEL

SEQ ID NO: 153942 - protein, 8 aa, Homo Sapiens
YLDLEATL

SEQ ID NO: 153943 - protein, 8 aa, Homo Sapiens
YLDPALEL

SEQ ID NO: 153944 - protein, 8 aa, Homo Sapiens
YLDSEQRL

SEQ ID NO: 153945 - protein, 8 aa, Homo Sapiens
YSDAIVWL

SEQ ID NO: 153946 - protein, 8 aa, Homo Sapiens
YSDDKVQL

SEQ ID NO: 153947 - protein, 8 aa, Homo Sapiens
YSDIVTTL

SEQ ID NO: 153948 - protein, 8 aa, Homo Sapiens
YSDLAEFL

SEQ ID NO: 153949 - protein, 8 aa, Homo Sapiens
YSDRISEL

SEQ ID NO: 153950 - protein, 8 aa, Homo Sapiens
YSDSTAKL

SEQ ID NO: 153951 - protein, 8 aa, Homo Sapiens
YSDVSGLL

SEQ ID NO: 153952 - protein, 8 aa, Homo Sapiens
YTDEAVVI

SEQ ID NO: 153953 - protein, 8 aa, Homo Sapiens
YTDELVEL

SEQ ID NO: 153954 - protein, 8 aa, Homo Sapiens
YTDFVMEL

SEQ ID NO: 153955 - protein, 8 aa, Homo Sapiens
YTDPQSKL

SEQ ID NO: 153956 - protein, 8 aa, Homo Sapiens
YVDDSIAL

SEQ ID NO: 153957 - protein, 8 aa, Homo Sapiens
YVDKNLEL

SEQ ID NO: 153958 - protein, 8 aa, Homo Sapiens
YYDNADKL

SEQ ID NO: 153959 - protein, 9 aa, Homo Sapiens
AAAAPRAVA

SEQ ID NO: 153960 - protein, 9 aa, Homo Sapiens
AAADASPSL

SEQ ID NO: 153961 - protein, 9 aa, Homo Sapiens
AAAGSPLSL

SEQ ID NO: 153962 - protein, 9 aa, Homo Sapiens
AAAGSPVFL

SEQ ID NO: 153963 - protein, 9 aa, Homo Sapiens
AACGGHVEL

SEQ ID NO: 153964 - protein, 9 aa, Homo Sapiens
AADAALRVL

SEQ ID NO: 153965 - protein, 9 aa, Homo Sapiens
AADAEPLEI

SEQ ID NO: 153966 - protein, 9 aa, Homo Sapiens
AADAKPESL

SEQ ID NO: 153967 - protein, 9 aa, Homo Sapiens
AADDDVKCL

SEQ ID NO: 153968 - protein, 9 aa, Homo Sapiens
AADDFLEDL

SEQ ID NO: 153969 - protein, 9 aa, Homo Sapiens
AADDHQALI

SEQ ID NO: 153970 - protein, 9 aa, Homo Sapiens
AADDHTVKL

SEQ ID NO: 153971 - protein, 9 aa, Homo Sapiens
AADDIHRSL

SEQ ID NO: 153972 - protein, 9 aa, Homo Sapiens
AADDLYSML

SEQ ID NO: 153973 - protein, 9 aa, Homo Sapiens
AADDSKLVL

SEQ ID NO: 153974 - protein, 9 aa, Homo Sapiens
AADDSSVKL

SEQ ID NO: 153975 - protein, 9 aa, Homo Sapiens
AADEITHCI

SEQ ID NO: 153976 - protein, 9 aa, Homo Sapiens
AADEPVTVL

SEQ ID NO: 153977 - protein, 9 aa, Homo Sapiens
AADEVLAVL

SEQ ID NO: 153978 - protein, 9 aa, Homo Sapiens
AADEVREKL

SEQ ID NO: 153979 - protein, 9 aa, Homo Sapiens
AADFAQMEL

SEQ ID NO: 153980 - protein, 9 aa, Homo Sapiens
AADFEIGHF

SEQ ID NO: 153981 - protein, 9 aa, Homo Sapiens
AADFVKAFI

SEQ ID NO: 153982 - protein, 9 aa, Homo Sapiens
AADGKGVVV

SEQ ID NO: 153983 - protein, 9 aa, Homo Sapiens
AADGKLLKL

SEQ ID NO: 153984 - protein, 9 aa, Homo Sapiens
AADGKVQVL

SEQ ID NO: 153985 - protein, 9 aa, Homo Sapiens
AADGPMPFL

SEQ ID NO: 153986 - protein, 9 aa, Homo Sapiens
AADGPQKLL

SEQ ID NO: 153987 - protein, 9 aa, Homo Sapiens
AADIENRVL

SEQ ID NO: 153988 - protein, 9 aa, Homo Sapiens
AADIPQTAV

SEQ ID NO: 153989 - protein, 9 aa, Homo Sapiens
AADKIHSSF

SEQ ID NO: 153990 - protein, 9 aa, Homo Sapiens
AADKRLTVL

SEQ ID NO: 153991 - protein, 9 aa, Homo Sapiens
AADLAHITA

SEQ ID NO: 153992 - protein, 9 aa, Homo Sapiens
AADLGSPSL

SEQ ID NO: 153993 - protein, 9 aa, Homo Sapiens
AADLKQFCL

SEQ ID NO: 153994 - protein, 9 aa, Homo Sapiens
AADLLVVHL

SEQ ID NO: 153995 - protein, 9 aa, Homo Sapiens
AADLPARGF

SEQ ID NO: 153996 - protein, 9 aa, Homo Sapiens
AADLPTKPT

SEQ ID NO: 153997 - protein, 9 aa, Homo Sapiens
AADLSEIEI

SEQ ID NO: 153998 - protein, 9 aa, Homo Sapiens
AADLSLHSF

SEQ ID NO: 153999 - protein, 9 aa, Homo Sapiens
AADLSMLVL

SEQ ID NO: 154000 - protein, 9 aa, Homo Sapiens
AADLVEKSF

SEQ ID NO: 154001 - protein, 9 aa, Homo Sapiens
AADMLGLSL

SEQ ID NO: 154002 - protein, 9 aa, Homo Sapiens
AADMNECCL

SEQ ID NO: 154003 - protein, 9 aa, Homo Sapiens
AADNCLREL

SEQ ID NO: 154004 - protein, 9 aa, Homo Sapiens
AADPSVVNL

SEQ ID NO: 154005 - protein, 9 aa, Homo Sapiens
AADPSWNSL

SEQ ID NO: 154006 - protein, 9 aa, Homo Sapiens
AADPVSPLL

SEQ ID NO: 154007 - protein, 9 aa, Homo Sapiens
AADQAKQLL

SEQ ID NO: 154008 - protein, 9 aa, Homo Sapiens
AADRCGAAL

SEQ ID NO: 154009 - protein, 9 aa, Homo Sapiens
AADRPGVSL

SEQ ID NO: 154010 - protein, 9 aa, Homo Sapiens
AADSAVRLW

SEQ ID NO: 154011 - protein, 9 aa, Homo Sapiens
AADSKSLVL

SEQ ID NO: 154012 - protein, 9 aa, Homo Sapiens
AADSPGSGL

SEQ ID NO: 154013 - protein, 9 aa, Homo Sapiens
AADSPSQNL

SEQ ID NO: 154014 - protein, 9 aa, Homo Sapiens
AADSWYLAL

SEQ ID NO: 154015 - protein, 9 aa, Homo Sapiens
AADSYFSLL

SEQ ID NO: 154016 - protein, 9 aa, Homo Sapiens
AADVILKTL

SEQ ID NO: 154017 - protein, 9 aa, Homo Sapiens
AADWHNLIL

SEQ ID NO: 154018 - protein, 9 aa, Homo Sapiens
AADYSQLEL

SEQ ID NO: 154019 - protein, 9 aa, Homo Sapiens
AAEAAEVIL

SEQ ID NO: 154020 - protein, 9 aa, Homo Sapiens
AAEAEPRAL

SEQ ID NO: 154021 - protein, 9 aa, Homo Sapiens
AAEAGAMTL

SEQ ID NO: 154022 - protein, 9 aa, Homo Sapiens
AAEATPVAL

SEQ ID NO: 154023 - protein, 9 aa, Homo Sapiens
AAEEAMKAL

SEQ ID NO: 154024 - protein, 9 aa, Homo Sapiens
AAEEANAVL

SEQ ID NO: 154025 - protein, 9 aa, Homo Sapiens
AAEEESRVL

SEQ ID NO: 154026 - protein, 9 aa, Homo Sapiens
AAEEFKVPA

SEQ ID NO: 154027 - protein, 9 aa, Homo Sapiens
AAEEPLSLL

SEQ ID NO: 154028 - protein, 9 aa, Homo Sapiens
AAEEPNAAV

SEQ ID NO: 154029 - protein, 9 aa, Homo Sapiens
AAEEPVSEV

SEQ ID NO: 154030 - protein, 9 aa, Homo Sapiens
AAEFGGESF

SEQ ID NO: 154031 - protein, 9 aa, Homo Sapiens
AAEFLTSKL

SEQ ID NO: 154032 - protein, 9 aa, Homo Sapiens
AAEFVPSFL

SEQ ID NO: 154033 - protein, 9 aa, Homo Sapiens
AAEKSITIL

SEQ ID NO: 154034 - protein, 9 aa, Homo Sapiens
AAELPGSSA

SEQ ID NO: 154035 - protein, 9 aa, Homo Sapiens
AAENIGSEL

SEQ ID NO: 154036 - protein, 9 aa, Homo Sapiens
AAEPTPTQV

SEQ ID NO: 154037 - protein, 9 aa, Homo Sapiens
AAERPGEAA

SEQ ID NO: 154038 - protein, 9 aa, Homo Sapiens
AAESMPLLL

SEQ ID NO: 154039 - protein, 9 aa, Homo Sapiens
AAETPALEL

SEQ ID NO: 154040 - protein, 9 aa, Homo Sapiens
AAETQSPSL

SEQ ID NO: 154041 - protein, 9 aa, Homo Sapiens
AAEVAATEI

SEQ ID NO: 154042 - protein, 9 aa, Homo Sapiens
AAEYGLVVL

SEQ ID NO: 154043 - protein, 9 aa, Homo Sapiens
AAGEPGTSM

SEQ ID NO: 154044 - protein, 9 aa, Homo Sapiens
AAVDAGMAM

SEQ ID NO: 154045 - protein, 9 aa, Homo Sapiens
AGDDAPRAV

SEQ ID NO: 154046 - protein, 9 aa, Homo Sapiens
AGDDCQAGL

SEQ ID NO: 154047 - protein, 9 aa, Homo Sapiens
AGDDPSVPL

SEQ ID NO: 154048 - protein, 9 aa, Homo Sapiens
AGDDRVLVM

SEQ ID NO: 154049 - protein, 9 aa, Homo Sapiens
AGDEGRVLL

SEQ ID NO: 154050 - protein, 9 aa, Homo Sapiens
AGDFSKTSL

SEQ ID NO: 154051 - protein, 9 aa, Homo Sapiens
AGDGGRVAL

SEQ ID NO: 154052 - protein, 9 aa, Homo Sapiens
AGDHVSLTL

SEQ ID NO: 154053 - protein, 9 aa, Homo Sapiens
AGDLPGLAA

SEQ ID NO: 154054 - protein, 9 aa, Homo Sapiens
AGDMGELAL

SEQ ID NO: 154055 - protein, 9 aa, Homo Sapiens
AGDNKNSVL

SEQ ID NO: 154056 - protein, 9 aa, Homo Sapiens
AGDSGFVSL

SEQ ID NO: 154057 - protein, 9 aa, Homo Sapiens
AGDSHTAAL

SEQ ID NO: 154058 - protein, 9 aa, Homo Sapiens
AGDSPGSQF

SEQ ID NO: 154059 - protein, 9 aa, Homo Sapiens
AGDTTNFHF

SEQ ID NO: 154060 - protein, 9 aa, Homo Sapiens
AIDDVDIDL

SEQ ID NO: 154061 - protein, 9 aa, Homo Sapiens
AIDEALAAL

SEQ ID NO: 154062 - protein, 9 aa, Homo Sapiens
AIDEDLTAL

SEQ ID NO: 154063 - protein, 9 aa, Homo Sapiens
AIDENKNAL

SEQ ID NO: 154064 - protein, 9 aa, Homo Sapiens
AIDFGEQAL

SEQ ID NO: 154065 - protein, 9 aa, Homo Sapiens
AIDIHNKTL

SEQ ID NO: 154066 - protein, 9 aa, Homo Sapiens
AIDIPHIWL

SEQ ID NO: 154067 - protein, 9 aa, Homo Sapiens
AIDIQNAYL

SEQ ID NO: 154068 - protein, 9 aa, Homo Sapiens
AIDQRNQQL

SEQ ID NO: 154069 - protein, 9 aa, Homo Sapiens
AIDRAGAEV

SEQ ID NO: 154070 - protein, 9 aa, Homo Sapiens
AIDSPVSFL

SEQ ID NO: 154071 - protein, 9 aa, Homo Sapiens
AKDEPDTNL

SEQ ID NO: 154072 - protein, 9 aa, Homo Sapiens
ALDDMISTL

SEQ ID NO: 154073 - protein, 9 aa, Homo Sapiens
ALDEAAAAL

SEQ ID NO: 154074 - protein, 9 aa, Homo Sapiens
ALDEPTTNL

SEQ ID NO: 154075 - protein, 9 aa, Homo Sapiens
ALDGDQMEL

SEQ ID NO: 154076 - protein, 9 aa, Homo Sapiens
ALDGGPRAL

SEQ ID NO: 154077 - protein, 9 aa, Homo Sapiens
ALDKATVLL

SEQ ID NO: 154078 - protein, 9 aa, Homo Sapiens
ALDKSSSTL

SEQ ID NO: 154079 - protein, 9 aa, Homo Sapiens
ALDLAPSSL

SEQ ID NO: 154080 - protein, 9 aa, Homo Sapiens
ALDLESLSL

SEQ ID NO: 154081 - protein, 9 aa, Homo Sapiens
ALDPPGPTL

SEQ ID NO: 154082 - protein, 9 aa, Homo Sapiens
ALDSEGRAL

SEQ ID NO: 154083 - protein, 9 aa, Homo Sapiens
ALDSGVSTM

SEQ ID NO: 154084 - protein, 9 aa, Homo Sapiens
ALDTGWNEL

SEQ ID NO: 154085 - protein, 9 aa, Homo Sapiens
ALDVPHAEL

SEQ ID NO: 154086 - protein, 9 aa, Homo Sapiens
ALDVPNTAF

SEQ ID NO: 154087 - protein, 9 aa, Homo Sapiens
ALDVPNTML

SEQ ID NO: 154088 - protein, 9 aa, Homo Sapiens
ALDVQEHSL

SEQ ID NO: 154089 - protein, 9 aa, Homo Sapiens
ALEDMFDAL

SEQ ID NO: 154090 - protein, 9 aa, Homo Sapiens
AMDLIISTL

SEQ ID NO: 154091 - protein, 9 aa, Homo Sapiens
AMDLPDVTL

SEQ ID NO: 154092 - protein, 9 aa, Homo Sapiens
AMDLVKNHL

SEQ ID NO: 154093 - protein, 9 aa, Homo Sapiens
ANDDPNGIF

SEQ ID NO: 154094 - protein, 9 aa, Homo Sapiens
ANDEATVSV

SEQ ID NO: 154095 - protein, 9 aa, Homo Sapiens
ANDVSFATI

SEQ ID NO: 154096 - protein, 9 aa, Homo Sapiens
AQDDPDSCL

SEQ ID NO: 154097 - protein, 9 aa, Homo Sapiens
AQDEHLITF

SEQ ID NO: 154098 - protein, 9 aa, Homo Sapiens
AQDELGRTL

SEQ ID NO: 154099 - protein, 9 aa, Homo Sapiens
AQDEPAESL

SEQ ID NO: 154100 - protein, 9 aa, Homo Sapiens
AQDLGVVNL

SEQ ID NO: 154101 - protein, 9 aa, Homo Sapiens
AQDLIRTIL

SEQ ID NO: 154102 - protein, 9 aa, Homo Sapiens
AQDLITRLL

SEQ ID NO: 154103 - protein, 9 aa, Homo Sapiens
AQDLQKERL

SEQ ID NO: 154104 - protein, 9 aa, Homo Sapiens
AQDLSREQL

SEQ ID NO: 154105 - protein, 9 aa, Homo Sapiens
AQDPEIASL

SEQ ID NO: 154106 - protein, 9 aa, Homo Sapiens
AQDPENQAL

SEQ ID NO: 154107 - protein, 9 aa, Homo Sapiens
AQDQLHNAL

SEQ ID NO: 154108 - protein, 9 aa, Homo Sapiens
AQDWPATSL

SEQ ID NO: 154109 - protein, 9 aa, Homo Sapiens
AQDYLQCVL

SEQ ID NO: 154110 - protein, 9 aa, Homo Sapiens
ASDCSPKEL

SEQ ID NO: 154111 - protein, 9 aa, Homo Sapiens
ASDDGTVRI

SEQ ID NO: 154112 - protein, 9 aa, Homo Sapiens
ASDDHTICL

SEQ ID NO: 154113 - protein, 9 aa, Homo Sapiens
ASDDHTVCL

SEQ ID NO: 154114 - protein, 9 aa, Homo Sapiens
ASDEPDRAL

SEQ ID NO: 154115 - protein, 9 aa, Homo Sapiens
ASDFGQVGL

SEQ ID NO: 154116 - protein, 9 aa, Homo Sapiens
ASDFPHISA

SEQ ID NO: 154117 - protein, 9 aa, Homo Sapiens
ASDGVVAAI

SEQ ID NO: 154118 - protein, 9 aa, Homo Sapiens
ASDHAPHTL

SEQ ID NO: 154119 - protein, 9 aa, Homo Sapiens
ASDIAMTEL

SEQ ID NO: 154120 - protein, 9 aa, Homo Sapiens
ASDIPGLHL

SEQ ID NO: 154121 - protein, 9 aa, Homo Sapiens
ASDITSASM

SEQ ID NO: 154122 - protein, 9 aa, Homo Sapiens
ASDKETYEL

SEQ ID NO: 154123 - protein, 9 aa, Homo Sapiens
ASDLESKQL

SEQ ID NO: 154124 - protein, 9 aa, Homo Sapiens
ASDLGSAAV

SEQ ID NO: 154125 - protein, 9 aa, Homo Sapiens
ASDLQRHSI

SEQ ID NO: 154126 - protein, 9 aa, Homo Sapiens
ASDLTRIHF

SEQ ID NO: 154127 - protein, 9 aa, Homo Sapiens
ASDLVTTVF

SEQ ID NO: 154128 - protein, 9 aa, Homo Sapiens
ASDQKVKAL

SEQ ID NO: 154129 - protein, 9 aa, Homo Sapiens
ASDQPSHSL

SEQ ID NO: 154130 - protein, 9 aa, Homo Sapiens
ASDQPWSGL

SEQ ID NO: 154131 - protein, 9 aa, Homo Sapiens
ASDSGAVEL

SEQ ID NO: 154132 - protein, 9 aa, Homo Sapiens
ASDVGSITL

SEQ ID NO: 154133 - protein, 9 aa, Homo Sapiens
ASDVVFATM

SEQ ID NO: 154134 - protein, 9 aa, Homo Sapiens
ASDVVLEVL

SEQ ID NO: 154135 - protein, 9 aa, Homo Sapiens
ASEEPWTVL

SEQ ID NO: 154136 - protein, 9 aa, Homo Sapiens
ATDAVGIVL

SEQ ID NO: 154137 - protein, 9 aa, Homo Sapiens
ATDDSLHQL

SEQ ID NO: 154138 - protein, 9 aa, Homo Sapiens
ATDFAENEL

SEQ ID NO: 154139 - protein, 9 aa, Homo Sapiens
ATDIQVLAL

SEQ ID NO: 154140 - protein, 9 aa, Homo Sapiens
ATDISTHSL

SEQ ID NO: 154141 - protein, 9 aa, Homo Sapiens
ATDLLSVAL

SEQ ID NO: 154142 - protein, 9 aa, Homo Sapiens
ATDPNILSL

SEQ ID NO: 154143 - protein, 9 aa, Homo Sapiens
ATDPSARTL

SEQ ID NO: 154144 - protein, 9 aa, Homo Sapiens
ATDRHPQAL

SEQ ID NO: 154145 - protein, 9 aa, Homo Sapiens
ATDTKNVQF

SEQ ID NO: 154146 - protein, 9 aa, Homo Sapiens
ATDYDNIEI

SEQ ID NO: 154147 - protein, 9 aa, Homo Sapiens
ATDYGGTSV

SEQ ID NO: 154148 - protein, 9 aa, Homo Sapiens
ATDYGMKSI

SEQ ID NO: 154149 - protein, 9 aa, Homo Sapiens
ATEEPGESF

SEQ ID NO: 154150 - protein, 9 aa, Homo Sapiens
ATEEPGPCL

SEQ ID NO: 154151 - protein, 9 aa, Homo Sapiens
AVDAVIAEL

SEQ ID NO: 154152 - protein, 9 aa, Homo Sapiens
AVDEAADAL

SEQ ID NO: 154153 - protein, 9 aa, Homo Sapiens
AVDELFTSL

SEQ ID NO: 154154 - protein, 9 aa, Homo Sapiens
AVDGISLHL

SEQ ID NO: 154155 - protein, 9 aa, Homo Sapiens
AVDGNTVEL

SEQ ID NO: 154156 - protein, 9 aa, Homo Sapiens
AVDIPHMDI

SEQ ID NO: 154157 - protein, 9 aa, Homo Sapiens
AVDKANLEI

SEQ ID NO: 154158 - protein, 9 aa, Homo Sapiens
AVDKAQAEL

SEQ ID NO: 154159 - protein, 9 aa, Homo Sapiens
AVDKSYCTL

SEQ ID NO: 154160 - protein, 9 aa, Homo Sapiens
AVDKTGRIL

SEQ ID NO: 154161 - protein, 9 aa, Homo Sapiens
AVDLCGAAL

SEQ ID NO: 154162 - protein, 9 aa, Homo Sapiens
AVDPNGAFL

SEQ ID NO: 154163 - protein, 9 aa, Homo Sapiens
AVDPQITSL

SEQ ID NO: 154164 - protein, 9 aa, Homo Sapiens
AVDPQPSVV

SEQ ID NO: 154165 - protein, 9 aa, Homo Sapiens
AVDPSSVAL

SEQ ID NO: 154166 - protein, 9 aa, Homo Sapiens
AVDPTSGQL

SEQ ID NO: 154167 - protein, 9 aa, Homo Sapiens
AVDRAITHL

SEQ ID NO: 154168 - protein, 9 aa, Homo Sapiens
AVDSTGTYM

SEQ ID NO: 154169 - protein, 9 aa, Homo Sapiens
AVDTKNNVL

SEQ ID NO: 154170 - protein, 9 aa, Homo Sapiens
AVDTNPLSL

SEQ ID NO: 154171 - protein, 9 aa, Homo Sapiens
AVDWDPTAL

SEQ ID NO: 154172 - protein, 9 aa, Homo Sapiens
CGDKPSISA

SEQ ID NO: 154173 - protein, 9 aa, Homo Sapiens
CQDIGAKSL

SEQ ID NO: 154174 - protein, 9 aa, Homo Sapiens
CSEKEGLSL

SEQ ID NO: 154175 - protein, 9 aa, Homo Sapiens
DADDAVYEL

SEQ ID NO: 154176 - protein, 9 aa, Homo Sapiens
DADQASNIL

SEQ ID NO: 154177 - protein, 9 aa, Homo Sapiens
DDSLPVLLE

SEQ ID NO: 154178 - protein, 9 aa, Homo Sapiens
DTNIVLGAL

SEQ ID NO: 154179 - protein, 9 aa, Homo Sapiens
EADFPKNPL

SEQ ID NO: 154180 - protein, 9 aa, Homo Sapiens
EADGAAWVL

SEQ ID NO: 154181 - protein, 9 aa, Homo Sapiens
EADGVHNTL

SEQ ID NO: 154182 - protein, 9 aa, Homo Sapiens
EADRAQQYF

SEQ ID NO: 154183 - protein, 9 aa, Homo Sapiens
EAEIPGANL

SEQ ID NO: 154184 - protein, 9 aa, Homo Sapiens
EESILDLVL

SEQ ID NO: 154185 - protein, 9 aa, Homo Sapiens
EGDLPNAVL

SEQ ID NO: 154186 - protein, 9 aa, Homo Sapiens
EIDLQKMPL

SEQ ID NO: 154187 - protein, 9 aa, Homo Sapiens
EIDVPSHEL

SEQ ID NO: 154188 - protein, 9 aa, Homo Sapiens
ESDDPNLAA

SEQ ID NO: 154189 - protein, 9 aa, Homo Sapiens
ESDYSKESL

SEQ ID NO: 154190 - protein, 9 aa, Homo Sapiens
EVDGKQVEL

SEQ ID NO: 154191 - protein, 9 aa, Homo Sapiens
EVDHPGPAL

SEQ ID NO: 154192 - protein, 9 aa, Homo Sapiens
EVDPGSAEL

SEQ ID NO: 154193 - protein, 9 aa, Homo Sapiens
FACEKNENL

SEQ ID NO: 154194 - protein, 9 aa, Homo Sapiens
FADAGLVCI

SEQ ID NO: 154195 - protein, 9 aa, Homo Sapiens
FADAHSNLA

SEQ ID NO: 154196 - protein, 9 aa, Homo Sapiens
FADAMEVIP

SEQ ID NO: 154197 - protein, 9 aa, Homo Sapiens
FADAVQELL

SEQ ID NO: 154198 - protein, 9 aa, Homo Sapiens
FADDGVKYL

SEQ ID NO: 154199 - protein, 9 aa, Homo Sapiens
FADDPCSSV

SEQ ID NO: 154200 - protein, 9 aa, Homo Sapiens
FADDYKIAI

SEQ ID NO: 154201 - protein, 9 aa, Homo Sapiens
FADEGSIFY

SEQ ID NO: 154202 - protein, 9 aa, Homo Sapiens
FADELSHLL

SEQ ID NO: 154203 - protein, 9 aa, Homo Sapiens
FADENNEKL

SEQ ID NO: 154204 - protein, 9 aa, Homo Sapiens
FADEVRLSF

SEQ ID NO: 154205 - protein, 9 aa, Homo Sapiens
FADFERHFL

SEQ ID NO: 154206 - protein, 9 aa, Homo Sapiens
FADFLQAHL

SEQ ID NO: 154207 - protein, 9 aa, Homo Sapiens
FADFLVYEF

SEQ ID NO: 154208 - protein, 9 aa, Homo Sapiens
FADFMVKDV

SEQ ID NO: 154209 - protein, 9 aa, Homo Sapiens
FADGFVKAL

SEQ ID NO: 154210 - protein, 9 aa, Homo Sapiens
FADGFVLVY

SEQ ID NO: 154211 - protein, 9 aa, Homo Sapiens
FADGHVLEL

SEQ ID NO: 154212 - protein, 9 aa, Homo Sapiens
FADGKVYAL

SEQ ID NO: 154213 - protein, 9 aa, Homo Sapiens
FADGLSLGL

SEQ ID NO: 154214 - protein, 9 aa, Homo Sapiens
FADGVILLL

SEQ ID NO: 154215 - protein, 9 aa, Homo Sapiens
FADGVYLVL

SEQ ID NO: 154216 - protein, 9 aa, Homo Sapiens
FADHVSSSL

SEQ ID NO: 154217 - protein, 9 aa, Homo Sapiens
FADHVVPLL

SEQ ID NO: 154218 - protein, 9 aa, Homo Sapiens
FADKHIQVL

SEQ ID NO: 154219 - protein, 9 aa, Homo Sapiens
FADLGYKQM

SEQ ID NO: 154220 - protein, 9 aa, Homo Sapiens
FADLLGTAF

SEQ ID NO: 154221 - protein, 9 aa, Homo Sapiens
FADLNLAEF

SEQ ID NO: 154222 - protein, 9 aa, Homo Sapiens
FADNDVSRF

SEQ ID NO: 154223 - protein, 9 aa, Homo Sapiens
FADNPGPMV

SEQ ID NO: 154224 - protein, 9 aa, Homo Sapiens
FADPIAANL

SEQ ID NO: 154225 - protein, 9 aa, Homo Sapiens
FADQAEILL

SEQ ID NO: 154226 - protein, 9 aa, Homo Sapiens
FADQENQVA

SEQ ID NO: 154227 - protein, 9 aa, Homo Sapiens
FADQEVRSL

SEQ ID NO: 154228 - protein, 9 aa, Homo Sapiens
FADQVEEIL

SEQ ID NO: 154229 - protein, 9 aa, Homo Sapiens
FADREVQLL

SEQ ID NO: 154230 - protein, 9 aa, Homo Sapiens
FADVAPLQL

SEQ ID NO: 154231 - protein, 9 aa, Homo Sapiens
FADVEGKNL

SEQ ID NO: 154232 - protein, 9 aa, Homo Sapiens
FADVNGWHL

SEQ ID NO: 154233 - protein, 9 aa, Homo Sapiens
FADWYLEQL

SEQ ID NO: 154234 - protein, 9 aa, Homo Sapiens
FADYNLLDL

SEQ ID NO: 154235 - protein, 9 aa, Homo Sapiens
FADYPCHTV

SEQ ID NO: 154236 - protein, 9 aa, Homo Sapiens
FADYRPTEV

SEQ ID NO: 154237 - protein, 9 aa, Homo Sapiens
FAEAGRSTL

SEQ ID NO: 154238 - protein, 9 aa, Homo Sapiens
FAEASGLEL

SEQ ID NO: 154239 - protein, 9 aa, Homo Sapiens
FAEAVGVQL

SEQ ID NO: 154240 - protein, 9 aa, Homo Sapiens
FAEDPPTSL

SEQ ID NO: 154241 - protein, 9 aa, Homo Sapiens
FAEEFAHSI

SEQ ID NO: 154242 - protein, 9 aa, Homo Sapiens
FAEEPGLVL

SEQ ID NO: 154243 - protein, 9 aa, Homo Sapiens
FAEEQTLVL

SEQ ID NO: 154244 - protein, 9 aa, Homo Sapiens
FAEERNQNL

SEQ ID NO: 154245 - protein, 9 aa, Homo Sapiens
FAEEVGAAL

SEQ ID NO: 154246 - protein, 9 aa, Homo Sapiens
FAEGFVKAL

SEQ ID NO: 154247 - protein, 9 aa, Homo Sapiens
FAEGFVRAL

SEQ ID NO: 154248 - protein, 9 aa, Homo Sapiens
FAEGKPLAL

SEQ ID NO: 154249 - protein, 9 aa, Homo Sapiens
FAEQPSVKL

SEQ ID NO: 154250 - protein, 9 aa, Homo Sapiens
FAERSVAKL

SEQ ID NO: 154251 - protein, 9 aa, Homo Sapiens
FAETIETVL

SEQ ID NO: 154252 - protein, 9 aa, Homo Sapiens
FAEWKVDML

SEQ ID NO: 154253 - protein, 9 aa, Homo Sapiens
FAGYSEEVL

SEQ ID NO: 154254 - protein, 9 aa, Homo Sapiens
FAIDPHLLL

SEQ ID NO: 154255 - protein, 9 aa, Homo Sapiens
FAIPLIEKL

SEQ ID NO: 154256 - protein, 9 aa, Homo Sapiens
FAMEIDPSL

SEQ ID NO: 154257 - protein, 9 aa, Homo Sapiens
FAMFDQSQI

SEQ ID NO: 154258 - protein, 9 aa, Homo Sapiens
FAQEALTVL

SEQ ID NO: 154259 - protein, 9 aa, Homo Sapiens
FASEVSNVL

SEQ ID NO: 154260 - protein, 9 aa, Homo Sapiens
FASFPHMVL

SEQ ID NO: 154261 - protein, 9 aa, Homo Sapiens
FASHVSPEV

SEQ ID NO: 154262 - protein, 9 aa, Homo Sapiens
FAYVEGESL

SEQ ID NO: 154263 - protein, 9 aa, Homo Sapiens
FDDEANHLL

SEQ ID NO: 154264 - protein, 9 aa, Homo Sapiens
FFDEESYSL

SEQ ID NO: 154265 - protein, 9 aa, Homo Sapiens
FFDEKLNSL

SEQ ID NO: 154266 - protein, 9 aa, Homo Sapiens
FFDNISSEL

SEQ ID NO: 154267 - protein, 9 aa, Homo Sapiens
FFDTNTSVL

SEQ ID NO: 154268 - protein, 9 aa, Homo Sapiens
FGDDIPSAL

SEQ ID NO: 154269 - protein, 9 aa, Homo Sapiens
FGDDWGSIL

SEQ ID NO: 154270 - protein, 9 aa, Homo Sapiens
FGDFSPTDV

SEQ ID NO: 154271 - protein, 9 aa, Homo Sapiens
FGDLGSAKL

SEQ ID NO: 154272 - protein, 9 aa, Homo Sapiens
FGDLHQTEL

SEQ ID NO: 154273 - protein, 9 aa, Homo Sapiens
FGDLTIKSL

SEQ ID NO: 154274 - protein, 9 aa, Homo Sapiens
FGDSACFTL

SEQ ID NO: 154275 - protein, 9 aa, Homo Sapiens
FGDTGGFHF

SEQ ID NO: 154276 - protein, 9 aa, Homo Sapiens
FGEIEAIEL

SEQ ID NO: 154277 - protein, 9 aa, Homo Sapiens
FGEIENIEL

SEQ ID NO: 154278 - protein, 9 aa, Homo Sapiens
FGEVESIEL

SEQ ID NO: 154279 - protein, 9 aa, Homo Sapiens
FIADHCPTL

SEQ ID NO: 154280 - protein, 9 aa, Homo Sapiens
FIAPTGHSL

SEQ ID NO: 154281 - protein, 9 aa, Homo Sapiens
FIDDANYSV

SEQ ID NO: 154282 - protein, 9 aa, Homo Sapiens
FIDDVVSAV

SEQ ID NO: 154283 - protein, 9 aa, Homo Sapiens
FIDEAGHCM

SEQ ID NO: 154284 - protein, 9 aa, Homo Sapiens
FIDEQNYIL

SEQ ID NO: 154285 - protein, 9 aa, Homo Sapiens
FIDEYVETV

SEQ ID NO: 154286 - protein, 9 aa, Homo Sapiens
FIDGGGSVL

SEQ ID NO: 154287 - protein, 9 aa, Homo Sapiens
FIDGHFVEM

SEQ ID NO: 154288 - protein, 9 aa, Homo Sapiens
FIDGNVESL

SEQ ID NO: 154289 - protein, 9 aa, Homo Sapiens
FIDTAQHML

SEQ ID NO: 154290 - protein, 9 aa, Homo Sapiens
FIDVGAGVI

SEQ ID NO: 154291 - protein, 9 aa, Homo Sapiens
FIESAHTEL

SEQ ID NO: 154292 - protein, 9 aa, Homo Sapiens
FIGDSGIPL

SEQ ID NO: 154293 - protein, 9 aa, Homo Sapiens
FLDASGAKL

SEQ ID NO: 154294 - protein, 9 aa, Homo Sapiens
FLDDLGTNL

SEQ ID NO: 154295 - protein, 9 aa, Homo Sapiens
FLDDLSQKL

SEQ ID NO: 154296 - protein, 9 aa, Homo Sapiens
FLDDNQIVT

SEQ ID NO: 154297 - protein, 9 aa, Homo Sapiens
FLDDVNLIL

SEQ ID NO: 154298 - protein, 9 aa, Homo Sapiens
FLDDVVHSL

SEQ ID NO: 154299 - protein, 9 aa, Homo Sapiens
FLDEDDMSL

SEQ ID NO: 154300 - protein, 9 aa, Homo Sapiens
FLDEKTHEL

SEQ ID NO: 154301 - protein, 9 aa, Homo Sapiens
FLDENVHFF

SEQ ID NO: 154302 - protein, 9 aa, Homo Sapiens
FLDEPTNHL

SEQ ID NO: 154303 - protein, 9 aa, Homo Sapiens
FLDGDQLTL

SEQ ID NO: 154304 - protein, 9 aa, Homo Sapiens
FLDGNELTL

SEQ ID NO: 154305 - protein, 9 aa, Homo Sapiens
FLDGNEMTL

SEQ ID NO: 154306 - protein, 9 aa, Homo Sapiens
FLDGRPLTL

SEQ ID NO: 154307 - protein, 9 aa, Homo Sapiens
FLDGYVSQL

SEQ ID NO: 154308 - protein, 9 aa, Homo Sapiens
FLDLTEQEF

SEQ ID NO: 154309 - protein, 9 aa, Homo Sapiens
FLDMNFQSL

SEQ ID NO: 154310 - protein, 9 aa, Homo Sapiens
FLDNLTEEL

SEQ ID NO: 154311 - protein, 9 aa, Homo Sapiens
FLDPIMSTL

SEQ ID NO: 154312 - protein, 9 aa, Homo Sapiens
FLDQHGHNL

SEQ ID NO: 154313 - protein, 9 aa, Homo Sapiens
FLDRPQQWL

SEQ ID NO: 154314 - protein, 9 aa, Homo Sapiens
FLDSEVSEL

SEQ ID NO: 154315 - protein, 9 aa, Homo Sapiens
FLDSPAKAL

SEQ ID NO: 154316 - protein, 9 aa, Homo Sapiens
FLDSQTATF

SEQ ID NO: 154317 - protein, 9 aa, Homo Sapiens
FLDSVTAEV

SEQ ID NO: 154318 - protein, 9 aa, Homo Sapiens
FLDTEEAEL

SEQ ID NO: 154319 - protein, 9 aa, Homo Sapiens
FLDVSGISL

SEQ ID NO: 154320 - protein, 9 aa, Homo Sapiens
FLEEANRVL

SEQ ID NO: 154321 - protein, 9 aa, Homo Sapiens
FLEEHGPAM

SEQ ID NO: 154322 - protein, 9 aa, Homo Sapiens
FLEKENTAL

SEQ ID NO: 154323 - protein, 9 aa, Homo Sapiens
FMDDTSRSI

SEQ ID NO: 154324 - protein, 9 aa, Homo Sapiens
FMDESTQCF

SEQ ID NO: 154325 - protein, 9 aa, Homo Sapiens
FNDDNAEKL

SEQ ID NO: 154326 - protein, 9 aa, Homo Sapiens
FNDGSSREL

SEQ ID NO: 154327 - protein, 9 aa, Homo Sapiens
FNDPNAKEM

SEQ ID NO: 154328 - protein, 9 aa, Homo Sapiens
FPDDATSPL

SEQ ID NO: 154329 - protein, 9 aa, Homo Sapiens
FQDFSHIFL

SEQ ID NO: 154330 - protein, 9 aa, Homo Sapiens
FQDIAIEVL

SEQ ID NO: 154331 - protein, 9 aa, Homo Sapiens
FQDKRNLYL

SEQ ID NO: 154332 - protein, 9 aa, Homo Sapiens
FQDLNQEVM

SEQ ID NO: 154333 - protein, 9 aa, Homo Sapiens
FQDLQVEAL

SEQ ID NO: 154334 - protein, 9 aa, Homo Sapiens
FQDLSSSIL

SEQ ID NO: 154335 - protein, 9 aa, Homo Sapiens
FQDPSVTQL

SEQ ID NO: 154336 - protein, 9 aa, Homo Sapiens
FQDPVPLTV

SEQ ID NO: 154337 - protein, 9 aa, Homo Sapiens
FQDSKNSDL

SEQ ID NO: 154338 - protein, 9 aa, Homo Sapiens
FQDTNARSL

SEQ ID NO: 154339 - protein, 9 aa, Homo Sapiens
FQEADSPTL

SEQ ID NO: 154340 - protein, 9 aa, Homo Sapiens
FSAGEPRVL

SEQ ID NO: 154341 - protein, 9 aa, Homo Sapiens
FSDDNARAV

SEQ ID NO: 154342 - protein, 9 aa, Homo Sapiens
FSDDNKITI

SEQ ID NO: 154343 - protein, 9 aa, Homo Sapiens
FSDDPNVTK

SEQ ID NO: 154344 - protein, 9 aa, Homo Sapiens
FSDDSDLQL

SEQ ID NO: 154345 - protein, 9 aa, Homo Sapiens
FSDEIRHNL

SEQ ID NO: 154346 - protein, 9 aa, Homo Sapiens
FSDENVRAI

SEQ ID NO: 154347 - protein, 9 aa, Homo Sapiens
FSDEQILTV

SEQ ID NO: 154348 - protein, 9 aa, Homo Sapiens
FSDEWVACL

SEQ ID NO: 154349 - protein, 9 aa, Homo Sapiens
FSDFEARQL

SEQ ID NO: 154350 - protein, 9 aa, Homo Sapiens
FSDFPQHDI

SEQ ID NO: 154351 - protein, 9 aa, Homo Sapiens
FSDIPSPYL

SEQ ID NO: 154352 - protein, 9 aa, Homo Sapiens
FSDLTEEML

SEQ ID NO: 154353 - protein, 9 aa, Homo Sapiens
FSDLTMHEL

SEQ ID NO: 154354 - protein, 9 aa, Homo Sapiens
FSDPESQTL

SEQ ID NO: 154355 - protein, 9 aa, Homo Sapiens
FSDPNFLAH

SEQ ID NO: 154356 - protein, 9 aa, Homo Sapiens
FSDPVYKEI

SEQ ID NO: 154357 - protein, 9 aa, Homo Sapiens
FSDRSSLTF

SEQ ID NO: 154358 - protein, 9 aa, Homo Sapiens
FSDSSGLTV

SEQ ID NO: 154359 - protein, 9 aa, Homo Sapiens
FSDTGNFGF

SEQ ID NO: 154360 - protein, 9 aa, Homo Sapiens
FSDTKIISL

SEQ ID NO: 154361 - protein, 9 aa, Homo Sapiens
FSDTLFSTL

SEQ ID NO: 154362 - protein, 9 aa, Homo Sapiens
FSDTLKTYF

SEQ ID NO: 154363 - protein, 9 aa, Homo Sapiens
FSDVHTMDL

SEQ ID NO: 154364 - protein, 9 aa, Homo Sapiens
FSEAEQRCV

SEQ ID NO: 154365 - protein, 9 aa, Homo Sapiens
FSEASSLSL

SEQ ID NO: 154366 - protein, 9 aa, Homo Sapiens
FSEDAGISL

SEQ ID NO: 154367 - protein, 9 aa, Homo Sapiens
FSEEHPVLL

SEQ ID NO: 154368 - protein, 9 aa, Homo Sapiens
FSEEIGNHL

SEQ ID NO: 154369 - protein, 9 aa, Homo Sapiens
FSEETPVVL

SEQ ID NO: 154370 - protein, 9 aa, Homo Sapiens
FSETINTEL

SEQ ID NO: 154371 - protein, 9 aa, Homo Sapiens
FSITPLSEL

SEQ ID NO: 154372 - protein, 9 aa, Homo Sapiens
FSPFHASVL

SEQ ID NO: 154373 - protein, 9 aa, Homo Sapiens
FSSDVTHEM

SEQ ID NO: 154374 - protein, 9 aa, Homo Sapiens
FSSEACREL

SEQ ID NO: 154375 - protein, 9 aa, Homo Sapiens
FSSEVTAAL

SEQ ID NO: 154376 - protein, 9 aa, Homo Sapiens
FSSPGGLSL

SEQ ID NO: 154377 - protein, 9 aa, Homo Sapiens
FTDASFLTL

SEQ ID NO: 154378 - protein, 9 aa, Homo Sapiens
FTDASSRSI

SEQ ID NO: 154379 - protein, 9 aa, Homo Sapiens
FTDDQLLVL

SEQ ID NO: 154380 - protein, 9 aa, Homo Sapiens
FTDEESRVF

SEQ ID NO: 154381 - protein, 9 aa, Homo Sapiens
FTDEEVDEL

SEQ ID NO: 154382 - protein, 9 aa, Homo Sapiens
FTDERIFML

SEQ ID NO: 154383 - protein, 9 aa, Homo Sapiens
FTDFDPHHF

SEQ ID NO: 154384 - protein, 9 aa, Homo Sapiens
FTDFQGGTL

SEQ ID NO: 154385 - protein, 9 aa, Homo Sapiens
FTDFTNVRM

SEQ ID NO: 154386 - protein, 9 aa, Homo Sapiens
FTDGGPRTL

SEQ ID NO: 154387 - protein, 9 aa, Homo Sapiens
FTDGITNKL

SEQ ID NO: 154388 - protein, 9 aa, Homo Sapiens
FTDIDIDTL

SEQ ID NO: 154389 - protein, 9 aa, Homo Sapiens
FTDIGKVDF

SEQ ID NO: 154390 - protein, 9 aa, Homo Sapiens
FTDISPEEL

SEQ ID NO: 154391 - protein, 9 aa, Homo Sapiens
FTDKANSGL

SEQ ID NO: 154392 - protein, 9 aa, Homo Sapiens
FTDLGNKDL

SEQ ID NO: 154393 - protein, 9 aa, Homo Sapiens
FTDQHNICL

SEQ ID NO: 154394 - protein, 9 aa, Homo Sapiens
FTDRPDLSL

SEQ ID NO: 154395 - protein, 9 aa, Homo Sapiens
FTDSGLSTL

SEQ ID NO: 154396 - protein, 9 aa, Homo Sapiens
FTDSGRQSV

SEQ ID NO: 154397 - protein, 9 aa, Homo Sapiens
FTDSLISNL

SEQ ID NO: 154398 - protein, 9 aa, Homo Sapiens
FTDTDELQL

SEQ ID NO: 154399 - protein, 9 aa, Homo Sapiens
FTDTVGNIL

SEQ ID NO: 154400 - protein, 9 aa, Homo Sapiens
FTDVAGPEL

SEQ ID NO: 154401 - protein, 9 aa, Homo Sapiens
FTDVIGHYI

SEQ ID NO: 154402 - protein, 9 aa, Homo Sapiens
FTDVNKIYL

SEQ ID NO: 154403 - protein, 9 aa, Homo Sapiens
FTDVPSIQI

SEQ ID NO: 154404 - protein, 9 aa, Homo Sapiens
FTDVVTTNL

SEQ ID NO: 154405 - protein, 9 aa, Homo Sapiens
FTDYDVIHL

SEQ ID NO: 154406 - protein, 9 aa, Homo Sapiens
FTETPSPVL

SEQ ID NO: 154407 - protein, 9 aa, Homo Sapiens
FTEWLHEVL

SEQ ID NO: 154408 - protein, 9 aa, Homo Sapiens
FVDADNLIL

SEQ ID NO: 154409 - protein, 9 aa, Homo Sapiens
FVDCPGHDI

SEQ ID NO: 154410 - protein, 9 aa, Homo Sapiens
FVDDQQTFF

SEQ ID NO: 154411 - protein, 9 aa, Homo Sapiens
FVDDSGRYL

SEQ ID NO: 154412 - protein, 9 aa, Homo Sapiens
FVDEFLTYL

SEQ ID NO: 154413 - protein, 9 aa, Homo Sapiens
FVDEGIKTL

SEQ ID NO: 154414 - protein, 9 aa, Homo Sapiens
FVDEGKATV

SEQ ID NO: 154415 - protein, 9 aa, Homo Sapiens
FVDEILTSL

SEQ ID NO: 154416 - protein, 9 aa, Homo Sapiens
FVDELRITL

SEQ ID NO: 154417 - protein, 9 aa, Homo Sapiens
FVDFEGISL

SEQ ID NO: 154418 - protein, 9 aa, Homo Sapiens
FVDGDHVIL

SEQ ID NO: 154419 - protein, 9 aa, Homo Sapiens
FVDGDWSVL

SEQ ID NO: 154420 - protein, 9 aa, Homo Sapiens
FVDGSAIQV

SEQ ID NO: 154421 - protein, 9 aa, Homo Sapiens
FVDGVSTVA

SEQ ID NO: 154422 - protein, 9 aa, Homo Sapiens
FVDIVKVLL

SEQ ID NO: 154423 - protein, 9 aa, Homo Sapiens
FVDKYSISL

SEQ ID NO: 154424 - protein, 9 aa, Homo Sapiens
FVDLEPTVI

SEQ ID NO: 154425 - protein, 9 aa, Homo Sapiens
FVDLGILDV

SEQ ID NO: 154426 - protein, 9 aa, Homo Sapiens
FVDLGSSEL

SEQ ID NO: 154427 - protein, 9 aa, Homo Sapiens
FVDLSGHNL

SEQ ID NO: 154428 - protein, 9 aa, Homo Sapiens
FVDPAQITM

SEQ ID NO: 154429 - protein, 9 aa, Homo Sapiens
FVDPVLNQL

SEQ ID NO: 154430 - protein, 9 aa, Homo Sapiens
FVDQCKTVL

SEQ ID NO: 154431 - protein, 9 aa, Homo Sapiens
FVDRGFYSV

SEQ ID NO: 154432 - protein, 9 aa, Homo Sapiens
FVDRSLLTL

SEQ ID NO: 154433 - protein, 9 aa, Homo Sapiens
FVDTQDRSL

SEQ ID NO: 154434 - protein, 9 aa, Homo Sapiens
FVDVQPSSL

SEQ ID NO: 154435 - protein, 9 aa, Homo Sapiens
FVDVSSVPL

SEQ ID NO: 154436 - protein, 9 aa, Homo Sapiens
FVEDSKVVL

SEQ ID NO: 154437 - protein, 9 aa, Homo Sapiens
FVEEEEHFL

SEQ ID NO: 154438 - protein, 9 aa, Homo Sapiens
FVEETVYLL

SEQ ID NO: 154439 - protein, 9 aa, Homo Sapiens
FYDEIKIEL

SEQ ID NO: 154440 - protein, 9 aa, Homo Sapiens
FYDVQFKEL

SEQ ID NO: 154441 - protein, 9 aa, Homo Sapiens
GADAGQLDL

SEQ ID NO: 154442 - protein, 9 aa, Homo Sapiens
GADELGEVI

SEQ ID NO: 154443 - protein, 9 aa, Homo Sapiens
GADERIFSL

SEQ ID NO: 154444 - protein, 9 aa, Homo Sapiens
GADFLVTEV

SEQ ID NO: 154445 - protein, 9 aa, Homo Sapiens
GADHVVKPL

SEQ ID NO: 154446 - protein, 9 aa, Homo Sapiens
GADIASKEF

SEQ ID NO: 154447 - protein, 9 aa, Homo Sapiens
GADIDALCV

SEQ ID NO: 154448 - protein, 9 aa, Homo Sapiens
GADIHSKEF

SEQ ID NO: 154449 - protein, 9 aa, Homo Sapiens
GADISKTVM

SEQ ID NO: 154450 - protein, 9 aa, Homo Sapiens
GADKSSNFL

SEQ ID NO: 154451 - protein, 9 aa, Homo Sapiens
GADLKNGAL

SEQ ID NO: 154452 - protein, 9 aa, Homo Sapiens
GADLPNLLF

SEQ ID NO: 154453 - protein, 9 aa, Homo Sapiens
GADLPNLTP

SEQ ID NO: 154454 - protein, 9 aa, Homo Sapiens
GADLPNYRW

SEQ ID NO: 154455 - protein, 9 aa, Homo Sapiens
GADLPSNHV

SEQ ID NO: 154456 - protein, 9 aa, Homo Sapiens
GADNGTMHL

SEQ ID NO: 154457 - protein, 9 aa, Homo Sapiens
GADPSTVEM

SEQ ID NO: 154458 - protein, 9 aa, Homo Sapiens
GADRLQTGM

SEQ ID NO: 154459 - protein, 9 aa, Homo Sapiens
GADVFLEAL

SEQ ID NO: 154460 - protein, 9 aa, Homo Sapiens
GADVVSKFL

SEQ ID NO: 154461 - protein, 9 aa, Homo Sapiens
GEPDHNEAL

SEQ ID NO: 154462 - protein, 9 aa, Homo Sapiens
GGDIANRVL

SEQ ID NO: 154463 - protein, 9 aa, Homo Sapiens
GGFDPHDVL

SEQ ID NO: 154464 - protein, 9 aa, Homo Sapiens
GIDSPSSSV

SEQ ID NO: 154465 - protein, 9 aa, Homo Sapiens
GIDSPVSEL

SEQ ID NO: 154466 - protein, 9 aa, Homo Sapiens
GIDVQGVEL

SEQ ID NO: 154467 - protein, 9 aa, Homo Sapiens
GIDVQQVSL

SEQ ID NO: 154468 - protein, 9 aa, Homo Sapiens
GLDVPSLCL

SEQ ID NO: 154469 - protein, 9 aa, Homo Sapiens
GNDLPSVEL

SEQ ID NO: 154470 - protein, 9 aa, Homo Sapiens
GQDLAKQAL

SEQ ID NO: 154471 - protein, 9 aa, Homo Sapiens
GQDTPGVSL

SEQ ID NO: 154472 - protein, 9 aa, Homo Sapiens
GSDDATCRL

SEQ ID NO: 154473 - protein, 9 aa, Homo Sapiens
GSDDIHNAL

SEQ ID NO: 154474 - protein, 9 aa, Homo Sapiens
GSDEPPVFL

SEQ ID NO: 154475 - protein, 9 aa, Homo Sapiens
GSDESYRPL

SEQ ID NO: 154476 - protein, 9 aa, Homo Sapiens
GSDGHSMAL

SEQ ID NO: 154477 - protein, 9 aa, Homo Sapiens
GSDIGNVVL

SEQ ID NO: 154478 - protein, 9 aa, Homo Sapiens
GSDPRVTQL

SEQ ID NO: 154479 - protein, 9 aa, Homo Sapiens
GVDEATRAV

SEQ ID NO: 154480 - protein, 9 aa, Homo Sapiens
GVDEPGWVL

SEQ ID NO: 154481 - protein, 9 aa, Homo Sapiens
GVDHPSHTL

SEQ ID NO: 154482 - protein, 9 aa, Homo Sapiens
GVDLPSVNL

SEQ ID NO: 154483 - protein, 9 aa, Homo Sapiens
GVDLSKIPL

SEQ ID NO: 154484 - protein, 9 aa, Homo Sapiens
GVDLVLNSL

SEQ ID NO: 154485 - protein, 9 aa, Homo Sapiens
HADDPERVV

SEQ ID NO: 154486 - protein, 9 aa, Homo Sapiens
HADDSFLVL

SEQ ID NO: 154487 - protein, 9 aa, Homo Sapiens
HADHSSLTL

SEQ ID NO: 154488 - protein, 9 aa, Homo Sapiens
HADILLINL

SEQ ID NO: 154489 - protein, 9 aa, Homo Sapiens
HADIPETCV

SEQ ID NO: 154490 - protein, 9 aa, Homo Sapiens
HADLAGVPL

SEQ ID NO: 154491 - protein, 9 aa, Homo Sapiens
HADPEPSVI

SEQ ID NO: 154492 - protein, 9 aa, Homo Sapiens
HADPTELAL

SEQ ID NO: 154493 - protein, 9 aa, Homo Sapiens
HADTVGIDA

SEQ ID NO: 154494 - protein, 9 aa, Homo Sapiens
HADVARAML

SEQ ID NO: 154495 - protein, 9 aa, Homo Sapiens
HADVGVALL

SEQ ID NO: 154496 - protein, 9 aa, Homo Sapiens
HAMQFPAEL

SEQ ID NO: 154497 - protein, 9 aa, Homo Sapiens
HCDVPGLHC

SEQ ID NO: 154498 - protein, 9 aa, Homo Sapiens
HFDASHVAL

SEQ ID NO: 154499 - protein, 9 aa, Homo Sapiens
HFDLSVIEL

SEQ ID NO: 154500 - protein, 9 aa, Homo Sapiens
HIDFGGTSV

SEQ ID NO: 154501 - protein, 9 aa, Homo Sapiens
HIDGDHLTL

SEQ ID NO: 154502 - protein, 9 aa, Homo Sapiens
HIDPNFASL

SEQ ID NO: 154503 - protein, 9 aa, Homo Sapiens
HIDSGKTAL

SEQ ID NO: 154504 - protein, 9 aa, Homo Sapiens
HIDSGKTTL

SEQ ID NO: 154505 - protein, 9 aa, Homo Sapiens
HIDTVINAL

SEQ ID NO: 154506 - protein, 9 aa, Homo Sapiens
HIDVITAEM

SEQ ID NO: 154507 - protein, 9 aa, Homo Sapiens
HIDVMYTTL

SEQ ID NO: 154508 - protein, 9 aa, Homo Sapiens
HLDDALRAL

SEQ ID NO: 154509 - protein, 9 aa, Homo Sapiens
HLDDQMTLL

SEQ ID NO: 154510 - protein, 9 aa, Homo Sapiens
HLDEAIHVL

SEQ ID NO: 154511 - protein, 9 aa, Homo Sapiens
HLDEARTLL

SEQ ID NO: 154512 - protein, 9 aa, Homo Sapiens
HLDEDQQEL

SEQ ID NO: 154513 - protein, 9 aa, Homo Sapiens
HLDEVFLEL

SEQ ID NO: 154514 - protein, 9 aa, Homo Sapiens
HLDFSGNAL

SEQ ID NO: 154515 - protein, 9 aa, Homo Sapiens
HLDLSFNSL

SEQ ID NO: 154516 - protein, 9 aa, Homo Sapiens
HLDSMNVSL

SEQ ID NO: 154517 - protein, 9 aa, Homo Sapiens
HLDTAQNAL

SEQ ID NO: 154518 - protein, 9 aa, Homo Sapiens
HLDVQPAAL

SEQ ID NO: 154519 - protein, 9 aa, Homo Sapiens
HMDHVSAVL

SEQ ID NO: 154520 - protein, 9 aa, Homo Sapiens
HQDFPSVVL

SEQ ID NO: 154521 - protein, 9 aa, Homo Sapiens
HQDSQVNAL

SEQ ID NO: 154522 - protein, 9 aa, Homo Sapiens
HSDAQALVL

SEQ ID NO: 154523 - protein, 9 aa, Homo Sapiens
HSDDEGTVL

SEQ ID NO: 154524 - protein, 9 aa, Homo Sapiens
HSDDGCLKL

SEQ ID NO: 154525 - protein, 9 aa, Homo Sapiens
HSDELTSLL

SEQ ID NO: 154526 - protein, 9 aa, Homo Sapiens
HSDIVVISL

SEQ ID NO: 154527 - protein, 9 aa, Homo Sapiens
HSDSEVASL

SEQ ID NO: 154528 - protein, 9 aa, Homo Sapiens
HSDSPAWSL

SEQ ID NO: 154529 - protein, 9 aa, Homo Sapiens
HSDWVNITF

SEQ ID NO: 154530 - protein, 9 aa, Homo Sapiens
HSETPNMEL

SEQ ID NO: 154531 - protein, 9 aa, Homo Sapiens
HTDDSALCM

SEQ ID NO: 154532 - protein, 9 aa, Homo Sapiens
HTDERGFSL

SEQ ID NO: 154533 - protein, 9 aa, Homo Sapiens
HTDLPVSVF

SEQ ID NO: 154534 - protein, 9 aa, Homo Sapiens
HTDNVIQWL

SEQ ID NO: 154535 - protein, 9 aa, Homo Sapiens
HTDSIGLVL

SEQ ID NO: 154536 - protein, 9 aa, Homo Sapiens
HTDVADVLL

SEQ ID NO: 154537 - protein, 9 aa, Homo Sapiens
HVDAGKSTI

SEQ ID NO: 154538 - protein, 9 aa, Homo Sapiens
HVDDVSSAL

SEQ ID NO: 154539 - protein, 9 aa, Homo Sapiens
HVDEIKEFL

SEQ ID NO: 154540 - protein, 9 aa, Homo Sapiens
HVDESGLSL

SEQ ID NO: 154541 - protein, 9 aa, Homo Sapiens
HVDGAAKSL

SEQ ID NO: 154542 - protein, 9 aa, Homo Sapiens
HVDGHLYEL

SEQ ID NO: 154543 - protein, 9 aa, Homo Sapiens
HVDGQTHML

SEQ ID NO: 154544 - protein, 9 aa, Homo Sapiens
HVDGVAVTL

SEQ ID NO: 154545 - protein, 9 aa, Homo Sapiens
HVDLQVSAL

SEQ ID NO: 154546 - protein, 9 aa, Homo Sapiens
HVDPSGTFL

SEQ ID NO: 154547 - protein, 9 aa, Homo Sapiens
HVDRENLVL

SEQ ID NO: 154548 - protein, 9 aa, Homo Sapiens
HVDVAGNVV

SEQ ID NO: 154549 - protein, 9 aa, Homo Sapiens
HVDVSSDSL

SEQ ID NO: 154550 - protein, 9 aa, Homo Sapiens
HVEKPPAAL

SEQ ID NO: 154551 - protein, 9 aa, Homo Sapiens
HWDPQEVTL

SEQ ID NO: 154552 - protein, 9 aa, Homo Sapiens
IADATVRSL

SEQ ID NO: 154553 - protein, 9 aa, Homo Sapiens
IADDFAAFV

SEQ ID NO: 154554 - protein, 9 aa, Homo Sapiens
IADDFIESV

SEQ ID NO: 154555 - protein, 9 aa, Homo Sapiens
IADEEQKAL

SEQ ID NO: 154556 - protein, 9 aa, Homo Sapiens
IADEGTWTL

SEQ ID NO: 154557 - protein, 9 aa, Homo Sapiens
IADEGTYTL

SEQ ID NO: 154558 - protein, 9 aa, Homo Sapiens
IADFGFSNL

SEQ ID NO: 154559 - protein, 9 aa, Homo Sapiens
IADFMTTNV

SEQ ID NO: 154560 - protein, 9 aa, Homo Sapiens
IADFPGLHL

SEQ ID NO: 154561 - protein, 9 aa, Homo Sapiens
IADGGFTEL

SEQ ID NO: 154562 - protein, 9 aa, Homo Sapiens
IADGGTPDI

SEQ ID NO: 154563 - protein, 9 aa, Homo Sapiens
IADGLPVAV

SEQ ID NO: 154564 - protein, 9 aa, Homo Sapiens
IADHYMQVL

SEQ ID NO: 154565 - protein, 9 aa, Homo Sapiens
IADIIRTCL

SEQ ID NO: 154566 - protein, 9 aa, Homo Sapiens
IADIVTSVF

SEQ ID NO: 154567 - protein, 9 aa, Homo Sapiens
IADKTENTL

SEQ ID NO: 154568 - protein, 9 aa, Homo Sapiens
IADLAHLLL

SEQ ID NO: 154569 - protein, 9 aa, Homo Sapiens
IADLDALDV

SEQ ID NO: 154570 - protein, 9 aa, Homo Sapiens
IADLGSTSI

SEQ ID NO: 154571 - protein, 9 aa, Homo Sapiens
IADLISSFL

SEQ ID NO: 154572 - protein, 9 aa, Homo Sapiens
IADLMEEKF

SEQ ID NO: 154573 - protein, 9 aa, Homo Sapiens
IADLPSTQL

SEQ ID NO: 154574 - protein, 9 aa, Homo Sapiens
IADLSHEAI

SEQ ID NO: 154575 - protein, 9 aa, Homo Sapiens
IADLVSKEL

SEQ ID NO: 154576 - protein, 9 aa, Homo Sapiens
IADLVTSVL

SEQ ID NO: 154577 - protein, 9 aa, Homo Sapiens
IADLVVAVF

SEQ ID NO: 154578 - protein, 9 aa, Homo Sapiens
IADMDFSAL

SEQ ID NO: 154579 - protein, 9 aa, Homo Sapiens
IADMGFARL

SEQ ID NO: 154580 - protein, 9 aa, Homo Sapiens
IADPDQPVL

SEQ ID NO: 154581 - protein, 9 aa, Homo Sapiens
IADPIVLAL

SEQ ID NO: 154582 - protein, 9 aa, Homo Sapiens
IADPNIAKL

SEQ ID NO: 154583 - protein, 9 aa, Homo Sapiens
IADPRGNTL

SEQ ID NO: 154584 - protein, 9 aa, Homo Sapiens
IADQRNFIF

SEQ ID NO: 154585 - protein, 9 aa, Homo Sapiens
IADRGAEYV

SEQ ID NO: 154586 - protein, 9 aa, Homo Sapiens
IADRLGLEL

SEQ ID NO: 154587 - protein, 9 aa, Homo Sapiens
IADRLNVEF

SEQ ID NO: 154588 - protein, 9 aa, Homo Sapiens
IADRPPPVI

SEQ ID NO: 154589 - protein, 9 aa, Homo Sapiens
IADSNPMVV

SEQ ID NO: 154590 - protein, 9 aa, Homo Sapiens
IADTGANVV

SEQ ID NO: 154591 - protein, 9 aa, Homo Sapiens
IADTVPKYL

SEQ ID NO: 154592 - protein, 9 aa, Homo Sapiens
IADVAPSAI

SEQ ID NO: 154593 - protein, 9 aa, Homo Sapiens
IADVNKPII

SEQ ID NO: 154594 - protein, 9 aa, Homo Sapiens
IAEAVRTTL

SEQ ID NO: 154595 - protein, 9 aa, Homo Sapiens
IAEDPKVFL

SEQ ID NO: 154596 - protein, 9 aa, Homo Sapiens
IAEGPETKI

SEQ ID NO: 154597 - protein, 9 aa, Homo Sapiens
IAEIGSLSL

SEQ ID NO: 154598 - protein, 9 aa, Homo Sapiens
IAEIYETEL

SEQ ID NO: 154599 - protein, 9 aa, Homo Sapiens
IAEQYHTVL

SEQ ID NO: 154600 - protein, 9 aa, Homo Sapiens
IAIEPGAAL

SEQ ID NO: 154601 - protein, 9 aa, Homo Sapiens
IANLEPVSL

SEQ ID NO: 154602 - protein, 9 aa, Homo Sapiens
IAPPPEECL

SEQ ID NO: 154603 - protein, 9 aa, Homo Sapiens
IFDRVLTEL

SEQ ID NO: 154604 - protein, 9 aa, Homo Sapiens
IGDEAATHL

SEQ ID NO: 154605 - protein, 9 aa, Homo Sapiens
IGDLVKSTL

SEQ ID NO: 154606 - protein, 9 aa, Homo Sapiens
IGDLVNIDL

SEQ ID NO: 154607 - protein, 9 aa, Homo Sapiens
IGDPEVLEI

SEQ ID NO: 154608 - protein, 9 aa, Homo Sapiens
IGDPITTCL

SEQ ID NO: 154609 - protein, 9 aa, Homo Sapiens
IGDPNLEFV

SEQ ID NO: 154610 - protein, 9 aa, Homo Sapiens
IGDSGVPAL

SEQ ID NO: 154611 - protein, 9 aa, Homo Sapiens
IGDSHCLAL

SEQ ID NO: 154612 - protein, 9 aa, Homo Sapiens
IGDVATQYF

SEQ ID NO: 154613 - protein, 9 aa, Homo Sapiens
IGPPLEKPV

SEQ ID NO: 154614 - protein, 9 aa, Homo Sapiens
IIDAPALAL

SEQ ID NO: 154615 - protein, 9 aa, Homo Sapiens
IIDDAEFEL

SEQ ID NO: 154616 - protein, 9 aa, Homo Sapiens
IIDDDVPSF

SEQ ID NO: 154617 - protein, 9 aa, Homo Sapiens
IIDDGDSNL

SEQ ID NO: 154618 - protein, 9 aa, Homo Sapiens
IIDDPNLVV

SEQ ID NO: 154619 - protein, 9 aa, Homo Sapiens
IIDDRNREL

SEQ ID NO: 154620 - protein, 9 aa, Homo Sapiens
IIDDSDSNL

SEQ ID NO: 154621 - protein, 9 aa, Homo Sapiens
IIDDVDSFL

SEQ ID NO: 154622 - protein, 9 aa, Homo Sapiens
IIDDVMKEL

SEQ ID NO: 154623 - protein, 9 aa, Homo Sapiens
IIDEFEQKL

SEQ ID NO: 154624 - protein, 9 aa, Homo Sapiens
IIDETMAQL

SEQ ID NO: 154625 - protein, 9 aa, Homo Sapiens
IIDGKIFCV

SEQ ID NO: 154626 - protein, 9 aa, Homo Sapiens
IIDKSGSTI

SEQ ID NO: 154627 - protein, 9 aa, Homo Sapiens
IIDKSGSTV

SEQ ID NO: 154628 - protein, 9 aa, Homo Sapiens
IIDLQANPL

SEQ ID NO: 154629 - protein, 9 aa, Homo Sapiens
IIDQEVQTL

SEQ ID NO: 154630 - protein, 9 aa, Homo Sapiens
IIDRAITSL

SEQ ID NO: 154631 - protein, 9 aa, Homo Sapiens
IIDRTNTTL

SEQ ID NO: 154632 - protein, 9 aa, Homo Sapiens
IIDSTNIIF

SEQ ID NO: 154633 - protein, 9 aa, Homo Sapiens
IIDTACEVL

SEQ ID NO: 154634 - protein, 9 aa, Homo Sapiens
IIDTPISEM

SEQ ID NO: 154635 - protein, 9 aa, Homo Sapiens
IIEEEFVSL

SEQ ID NO: 154636 - protein, 9 aa, Homo Sapiens
IIEPTSPCL

SEQ ID NO: 154637 - protein, 9 aa, Homo Sapiens
ILDAAGANL

SEQ ID NO: 154638 - protein, 9 aa, Homo Sapiens
ILDDATSAL

SEQ ID NO: 154639 - protein, 9 aa, Homo Sapiens
ILDDKSKEL

SEQ ID NO: 154640 - protein, 9 aa, Homo Sapiens
ILDDVAMVL

SEQ ID NO: 154641 - protein, 9 aa, Homo Sapiens
ILDEAERSL

SEQ ID NO: 154642 - protein, 9 aa, Homo Sapiens
ILDEATSAL

SEQ ID NO: 154643 - protein, 9 aa, Homo Sapiens
ILDELVKSL

SEQ ID NO: 154644 - protein, 9 aa, Homo Sapiens
ILDEPTNHL

SEQ ID NO: 154645 - protein, 9 aa, Homo Sapiens
ILDEPTNNL

SEQ ID NO: 154646 - protein, 9 aa, Homo Sapiens
ILDEVDAAL

SEQ ID NO: 154647 - protein, 9 aa, Homo Sapiens
ILDIAGYDL

SEQ ID NO: 154648 - protein, 9 aa, Homo Sapiens
ILDIPTHTI

SEQ ID NO: 154649 - protein, 9 aa, Homo Sapiens
ILDISEHTL

SEQ ID NO: 154650 - protein, 9 aa, Homo Sapiens
ILDNPVVQL

SEQ ID NO: 154651 - protein, 9 aa, Homo Sapiens
ILDPHVVLL

SEQ ID NO: 154652 - protein, 9 aa, Homo Sapiens
ILDQTKTEL

SEQ ID NO: 154653 - protein, 9 aa, Homo Sapiens
ILDSHAATL

SEQ ID NO: 154654 - protein, 9 aa, Homo Sapiens
ILDVSGNAI

SEQ ID NO: 154655 - protein, 9 aa, Homo Sapiens
ILEEPSKAL

SEQ ID NO: 154656 - protein, 9 aa, Homo Sapiens
IMDHVEESL

SEQ ID NO: 154657 - protein, 9 aa, Homo Sapiens
IQDDAVHTL

SEQ ID NO: 154658 - protein, 9 aa, Homo Sapiens
IQDEIRSVI

SEQ ID NO: 154659 - protein, 9 aa, Homo Sapiens
IQDEIVDFL

SEQ ID NO: 154660 - protein, 9 aa, Homo Sapiens
IQDFQASVL

SEQ ID NO: 154661 - protein, 9 aa, Homo Sapiens
IQDFQSVTL

SEQ ID NO: 154662 - protein, 9 aa, Homo Sapiens
IQDLGPKEL

SEQ ID NO: 154663 - protein, 9 aa, Homo Sapiens
IQDLTGLDV

SEQ ID NO: 154664 - protein, 9 aa, Homo Sapiens
IQDVQSEAL

SEQ ID NO: 154665 - protein, 9 aa, Homo Sapiens
IQDVSLESL

SEQ ID NO: 154666 - protein, 9 aa, Homo Sapiens
ISDADTKEV

SEQ ID NO: 154667 - protein, 9 aa, Homo Sapiens
ISDAGLLHL

SEQ ID NO: 154668 - protein, 9 aa, Homo Sapiens
ISDAPINEV

SEQ ID NO: 154669 - protein, 9 aa, Homo Sapiens
ISDAPVTGM

SEQ ID NO: 154670 - protein, 9 aa, Homo Sapiens
ISDEANSNF

SEQ ID NO: 154671 - protein, 9 aa, Homo Sapiens
ISDEECFVL

SEQ ID NO: 154672 - protein, 9 aa, Homo Sapiens
ISDEGIAYL

SEQ ID NO: 154673 - protein, 9 aa, Homo Sapiens
ISDEVEKEL

SEQ ID NO: 154674 - protein, 9 aa, Homo Sapiens
ISDHAIQEL

SEQ ID NO: 154675 - protein, 9 aa, Homo Sapiens
ISDIANDAL

SEQ ID NO: 154676 - protein, 9 aa, Homo Sapiens
ISDINPRSV

SEQ ID NO: 154677 - protein, 9 aa, Homo Sapiens
ISDIPTGIP

SEQ ID NO: 154678 - protein, 9 aa, Homo Sapiens
ISDKITSEL

SEQ ID NO: 154679 - protein, 9 aa, Homo Sapiens
ISDKQCAEL

SEQ ID NO: 154680 - protein, 9 aa, Homo Sapiens
ISDLAQHYL

SEQ ID NO: 154681 - protein, 9 aa, Homo Sapiens
ISDLGELSF

SEQ ID NO: 154682 - protein, 9 aa, Homo Sapiens
ISDLGQHTL

SEQ ID NO: 154683 - protein, 9 aa, Homo Sapiens
ISDLSEHVF

SEQ ID NO: 154684 - protein, 9 aa, Homo Sapiens
ISDLSINSL

SEQ ID NO: 154685 - protein, 9 aa, Homo Sapiens
ISDLSVNSL

SEQ ID NO: 154686 - protein, 9 aa, Homo Sapiens
ISDLVKVTL

SEQ ID NO: 154687 - protein, 9 aa, Homo Sapiens
ISDNAAKIL

SEQ ID NO: 154688 - protein, 9 aa, Homo Sapiens
ISDNAARVL

SEQ ID NO: 154689 - protein, 9 aa, Homo Sapiens
ISDPEKWEI

SEQ ID NO: 154690 - protein, 9 aa, Homo Sapiens
ISDPYNVNL

SEQ ID NO: 154691 - protein, 9 aa, Homo Sapiens
ISDQNIKDL

SEQ ID NO: 154692 - protein, 9 aa, Homo Sapiens
ISDRYYTAL

SEQ ID NO: 154693 - protein, 9 aa, Homo Sapiens
ISDSADCSL

SEQ ID NO: 154694 - protein, 9 aa, Homo Sapiens
ISDSNPMVV

SEQ ID NO: 154695 - protein, 9 aa, Homo Sapiens
ISDSVGVFL

SEQ ID NO: 154696 - protein, 9 aa, Homo Sapiens
ISDSVLVDI

SEQ ID NO: 154697 - protein, 9 aa, Homo Sapiens
ISDTGGQQL

SEQ ID NO: 154698 - protein, 9 aa, Homo Sapiens
ISDTGIMHL

SEQ ID NO: 154699 - protein, 9 aa, Homo Sapiens
ISDTMVAQL

SEQ ID NO: 154700 - protein, 9 aa, Homo Sapiens
ISDTQRISL

SEQ ID NO: 154701 - protein, 9 aa, Homo Sapiens
ISDVLQRDL

SEQ ID NO: 154702 - protein, 9 aa, Homo Sapiens
ISDVVKQPA

SEQ ID NO: 154703 - protein, 9 aa, Homo Sapiens
ISDYAVKIV

SEQ ID NO: 154704 - protein, 9 aa, Homo Sapiens
ISDYTVTEI

SEQ ID NO: 154705 - protein, 9 aa, Homo Sapiens
ISEQTGKEL

SEQ ID NO: 154706 - protein, 9 aa, Homo Sapiens
ISVLPMEVL

SEQ ID NO: 154707 - protein, 9 aa, Homo Sapiens
ITDAEGLGL

SEQ ID NO: 154708 - protein, 9 aa, Homo Sapiens
ITDDEIISL

SEQ ID NO: 154709 - protein, 9 aa, Homo Sapiens
ITDEQIQEM

SEQ ID NO: 154710 - protein, 9 aa, Homo Sapiens
ITDFQFKEL

SEQ ID NO: 154711 - protein, 9 aa, Homo Sapiens
ITDFSGIVL

SEQ ID NO: 154712 - protein, 9 aa, Homo Sapiens
ITDGNSEHL

SEQ ID NO: 154713 - protein, 9 aa, Homo Sapiens
ITDGVITDL

SEQ ID NO: 154714 - protein, 9 aa, Homo Sapiens
ITDKGIIAL

SEQ ID NO: 154715 - protein, 9 aa, Homo Sapiens
ITDLPSEVL

SEQ ID NO: 154716 - protein, 9 aa, Homo Sapiens
ITDNDIQSL

SEQ ID NO: 154717 - protein, 9 aa, Homo Sapiens
ITDPANEKL

SEQ ID NO: 154718 - protein, 9 aa, Homo Sapiens
ITDPSVIVM

SEQ ID NO: 154719 - protein, 9 aa, Homo Sapiens
ITDSKVSNL

SEQ ID NO: 154720 - protein, 9 aa, Homo Sapiens
ITDSTGTHL

SEQ ID NO: 154721 - protein, 9 aa, Homo Sapiens
ITDVHSNDL

SEQ ID NO: 154722 - protein, 9 aa, Homo Sapiens
ITDVSLHAL

SEQ ID NO: 154723 - protein, 9 aa, Homo Sapiens
IVDAALSAL

SEQ ID NO: 154724 - protein, 9 aa, Homo Sapiens
IVDAANAVI

SEQ ID NO: 154725 - protein, 9 aa, Homo Sapiens
IVDANLSVL

SEQ ID NO: 154726 - protein, 9 aa, Homo Sapiens
IVDAVGTML

SEQ ID NO: 154727 - protein, 9 aa, Homo Sapiens
IVDDCGGAF

SEQ ID NO: 154728 - protein, 9 aa, Homo Sapiens
IVDDFGTHL

SEQ ID NO: 154729 - protein, 9 aa, Homo Sapiens
IVDDPEGFF

SEQ ID NO: 154730 - protein, 9 aa, Homo Sapiens
IVDEGGDAL

SEQ ID NO: 154731 - protein, 9 aa, Homo Sapiens
IVDEVNGLI

SEQ ID NO: 154732 - protein, 9 aa, Homo Sapiens
IVDGERTVL

SEQ ID NO: 154733 - protein, 9 aa, Homo Sapiens
IVDIGPDSL

SEQ ID NO: 154734 - protein, 9 aa, Homo Sapiens
IVDIPGTSV

SEQ ID NO: 154735 - protein, 9 aa, Homo Sapiens
IVDKSGRTL

SEQ ID NO: 154736 - protein, 9 aa, Homo Sapiens
IVDLTCESL

SEQ ID NO: 154737 - protein, 9 aa, Homo Sapiens
IVDPQNQTM

SEQ ID NO: 154738 - protein, 9 aa, Homo Sapiens
IVDPVDSTL

SEQ ID NO: 154739 - protein, 9 aa, Homo Sapiens
IVDQVMVTL

SEQ ID NO: 154740 - protein, 9 aa, Homo Sapiens
IVDRGSTNL

SEQ ID NO: 154741 - protein, 9 aa, Homo Sapiens
IVDRPGQQT

SEQ ID NO: 154742 - protein, 9 aa, Homo Sapiens
IVDRPVTLV

SEQ ID NO: 154743 - protein, 9 aa, Homo Sapiens
IVDSARSIL

SEQ ID NO: 154744 - protein, 9 aa, Homo Sapiens
IWDVSVNSV

SEQ ID NO: 154745 - protein, 9 aa, Homo Sapiens
IYDLATQTL

SEQ ID NO: 154746 - protein, 9 aa, Homo Sapiens
KAAELEMEL

SEQ ID NO: 154747 - protein, 9 aa, Homo Sapiens
KAAIMETLR

SEQ ID NO: 154748 - protein, 9 aa, Homo Sapiens
KADDPYAHL

SEQ ID NO: 154749 - protein, 9 aa, Homo Sapiens
KADEGLASL

SEQ ID NO: 154750 - protein, 9 aa, Homo Sapiens
KADEVLEIL

SEQ ID NO: 154751 - protein, 9 aa, Homo Sapiens
KADFPTPSI

SEQ ID NO: 154752 - protein, 9 aa, Homo Sapiens
KADGKIMAL

SEQ ID NO: 154753 - protein, 9 aa, Homo Sapiens
KADGQQSSF

SEQ ID NO: 154754 - protein, 9 aa, Homo Sapiens
KADGVPVYL

SEQ ID NO: 154755 - protein, 9 aa, Homo Sapiens
KADIIVSEL

SEQ ID NO: 154756 - protein, 9 aa, Homo Sapiens
KADIPLVVL

SEQ ID NO: 154757 - protein, 9 aa, Homo Sapiens
KADIPSVAF

SEQ ID NO: 154758 - protein, 9 aa, Homo Sapiens
KADLESESF

SEQ ID NO: 154759 - protein, 9 aa, Homo Sapiens
KADLGKIVL

SEQ ID NO: 154760 - protein, 9 aa, Homo Sapiens
KADLGPISL

SEQ ID NO: 154761 - protein, 9 aa, Homo Sapiens
KADLTALFL

SEQ ID NO: 154762 - protein, 9 aa, Homo Sapiens
KADMTCRGF

SEQ ID NO: 154763 - protein, 9 aa, Homo Sapiens
KADNVGSAL

SEQ ID NO: 154764 - protein, 9 aa, Homo Sapiens
KADPQGPEL

SEQ ID NO: 154765 - protein, 9 aa, Homo Sapiens
KADPSHFEL

SEQ ID NO: 154766 - protein, 9 aa, Homo Sapiens
KADQKGVTI

SEQ ID NO: 154767 - protein, 9 aa, Homo Sapiens
KADQQLRSL

SEQ ID NO: 154768 - protein, 9 aa, Homo Sapiens
KADRETVAV

SEQ ID NO: 154769 - protein, 9 aa, Homo Sapiens
KADSINKPF

SEQ ID NO: 154770 - protein, 9 aa, Homo Sapiens
KADSRLKAL

SEQ ID NO: 154771 - protein, 9 aa, Homo Sapiens
KADSVVVLL

SEQ ID NO: 154772 - protein, 9 aa, Homo Sapiens
KADTEEEFL

SEQ ID NO: 154773 - protein, 9 aa, Homo Sapiens
KADVEEEFL

SEQ ID NO: 154774 - protein, 9 aa, Homo Sapiens
KADVEEESL

SEQ ID NO: 154775 - protein, 9 aa, Homo Sapiens
KADVEGELL

SEQ ID NO: 154776 - protein, 9 aa, Homo Sapiens
KADVEKVAL

SEQ ID NO: 154777 - protein, 9 aa, Homo Sapiens
KADVVISAF

SEQ ID NO: 154778 - protein, 9 aa, Homo Sapiens
KADVVPVTL

SEQ ID NO: 154779 - protein, 9 aa, Homo Sapiens
KAEEPPSQL

SEQ ID NO: 154780 - protein, 9 aa, Homo Sapiens
KAMEAASSL

SEQ ID NO: 154781 - protein, 9 aa, Homo Sapiens
KAPGSTSNL

SEQ ID NO: 154782 - protein, 9 aa, Homo Sapiens
KAVNPGRSL

SEQ ID NO: 154783 - protein, 9 aa, Homo Sapiens
KFDETEQAL

SEQ ID NO: 154784 - protein, 9 aa, Homo Sapiens
KGDEVTITL

SEQ ID NO: 154785 - protein, 9 aa, Homo Sapiens
KGDFSSNEV

SEQ ID NO: 154786 - protein, 9 aa, Homo Sapiens
KGDLENAFL

SEQ ID NO: 154787 - protein, 9 aa, Homo Sapiens
KGDSTIREL

SEQ ID NO: 154788 - protein, 9 aa, Homo Sapiens
KIDDFPNEL

SEQ ID NO: 154789 - protein, 9 aa, Homo Sapiens
KIDDILQTL

SEQ ID NO: 154790 - protein, 9 aa, Homo Sapiens
KIDDKPVKI

SEQ ID NO: 154791 - protein, 9 aa, Homo Sapiens
KIDDTIRYL

SEQ ID NO: 154792 - protein, 9 aa, Homo Sapiens
KIDEKTAEL

SEQ ID NO: 154793 - protein, 9 aa, Homo Sapiens
KIDKYTEVL

SEQ ID NO: 154794 - protein, 9 aa, Homo Sapiens
KIDLAGSSL

SEQ ID NO: 154795 - protein, 9 aa, Homo Sapiens
KIDLENRQV

SEQ ID NO: 154796 - protein, 9 aa, Homo Sapiens
KIDLETHSL

SEQ ID NO: 154797 - protein, 9 aa, Homo Sapiens
KLDDMLSEL

SEQ ID NO: 154798 - protein, 9 aa, Homo Sapiens
KLDETGNSL

SEQ ID NO: 154799 - protein, 9 aa, Homo Sapiens
KLDETGVAL

SEQ ID NO: 154800 - protein, 9 aa, Homo Sapiens
KLDLNGNTL

SEQ ID NO: 154801 - protein, 9 aa, Homo Sapiens
KLDVGNAEV

SEQ ID NO: 154802 - protein, 9 aa, Homo Sapiens
KMDDIVVVA

SEQ ID NO: 154803 - protein, 9 aa, Homo Sapiens
KMDDPNFIP

SEQ ID NO: 154804 - protein, 9 aa, Homo Sapiens
KMDLPGVSI

SEQ ID NO: 154805 - protein, 9 aa, Homo Sapiens
KMDRALLEL

SEQ ID NO: 154806 - protein, 9 aa, Homo Sapiens
KNAESNAEL

SEQ ID NO: 154807 - protein, 9 aa, Homo Sapiens
KNDDFMNAL

SEQ ID NO: 154808 - protein, 9 aa, Homo Sapiens
KNDIAINEL

SEQ ID NO: 154809 - protein, 9 aa, Homo Sapiens
KNDIPSSYM

SEQ ID NO: 154810 - protein, 9 aa, Homo Sapiens
KNDLAVVDV

SEQ ID NO: 154811 - protein, 9 aa, Homo Sapiens
KNDQANYSL

SEQ ID NO: 154812 - protein, 9 aa, Homo Sapiens
KNDVGYREL

SEQ ID NO: 154813 - protein, 9 aa, Homo Sapiens
KQDESVKAL

SEQ ID NO: 154814 - protein, 9 aa, Homo Sapiens
KQDETQTKI

SEQ ID NO: 154815 - protein, 9 aa, Homo Sapiens
KQDFSPEVL

SEQ ID NO: 154816 - protein, 9 aa, Homo Sapiens
KQDGTIQNL

SEQ ID NO: 154817 - protein, 9 aa, Homo Sapiens
KQDLGPVPM

SEQ ID NO: 154818 - protein, 9 aa, Homo Sapiens
KQDLVELYL

SEQ ID NO: 154819 - protein, 9 aa, Homo Sapiens
KQDQTLAEL

SEQ ID NO: 154820 - protein, 9 aa, Homo Sapiens
KQDSGHLDL

SEQ ID NO: 154821 - protein, 9 aa, Homo Sapiens
KQDVIITAL

SEQ ID NO: 154822 - protein, 9 aa, Homo Sapiens
KQWLMTEAL

SEQ ID NO: 154823 - protein, 9 aa, Homo Sapiens
KSDAACQTL

SEQ ID NO: 154824 - protein, 9 aa, Homo Sapiens
KSDAPDTLL

SEQ ID NO: 154825 - protein, 9 aa, Homo Sapiens
KSDEGGKVL

SEQ ID NO: 154826 - protein, 9 aa, Homo Sapiens
KSDEKTWNL

SEQ ID NO: 154827 - protein, 9 aa, Homo Sapiens
KSDERLTAF

SEQ ID NO: 154828 - protein, 9 aa, Homo Sapiens
KSDEVTQEI

SEQ ID NO: 154829 - protein, 9 aa, Homo Sapiens
KSDHVAACL

SEQ ID NO: 154830 - protein, 9 aa, Homo Sapiens
KSDIDEVAL

SEQ ID NO: 154831 - protein, 9 aa, Homo Sapiens
KSDIGEVIL

SEQ ID NO: 154832 - protein, 9 aa, Homo Sapiens
KSDIYLNLL

SEQ ID NO: 154833 - protein, 9 aa, Homo Sapiens
KSDLLKAAL

SEQ ID NO: 154834 - protein, 9 aa, Homo Sapiens
KSDLQMQKI

SEQ ID NO: 154835 - protein, 9 aa, Homo Sapiens
KSDPSIVRL

SEQ ID NO: 154836 - protein, 9 aa, Homo Sapiens
KSDSPAIQL

SEQ ID NO: 154837 - protein, 9 aa, Homo Sapiens
KSDVPIQLL

SEQ ID NO: 154838 - protein, 9 aa, Homo Sapiens
KSEGNHPAL

SEQ ID NO: 154839 - protein, 9 aa, Homo Sapiens
KTDEMHTAL

SEQ ID NO: 154840 - protein, 9 aa, Homo Sapiens
KTDESSPVL

SEQ ID NO: 154841 - protein, 9 aa, Homo Sapiens
KTDHRNVEL

SEQ ID NO: 154842 - protein, 9 aa, Homo Sapiens
KTDPSVRPM

SEQ ID NO: 154843 - protein, 9 aa, Homo Sapiens
KTDQLVSFL

SEQ ID NO: 154844 - protein, 9 aa, Homo Sapiens
KTDVCTVHL

SEQ ID NO: 154845 - protein, 9 aa, Homo Sapiens
KTDVVVNSV

SEQ ID NO: 154846 - protein, 9 aa, Homo Sapiens
KTTTPGPSL

SEQ ID NO: 154847 - protein, 9 aa, Homo Sapiens
KVDDCSEVL

SEQ ID NO: 154848 - protein, 9 aa, Homo Sapiens
KVDEAVAVL

SEQ ID NO: 154849 - protein, 9 aa, Homo Sapiens
KVDELTTEI

SEQ ID NO: 154850 - protein, 9 aa, Homo Sapiens
KVDLAKRTL

SEQ ID NO: 154851 - protein, 9 aa, Homo Sapiens
KVDPLFTEL

SEQ ID NO: 154852 - protein, 9 aa, Homo Sapiens
KVDPSGVSL

SEQ ID NO: 154853 - protein, 9 aa, Homo Sapiens
KVDSEENTL

SEQ ID NO: 154854 - protein, 9 aa, Homo Sapiens
KVEEPSQCL

SEQ ID NO: 154855 - protein, 9 aa, Homo Sapiens
LAAARLAAA

SEQ ID NO: 154856 - protein, 9 aa, Homo Sapiens
LADAINTEF

SEQ ID NO: 154857 - protein, 9 aa, Homo Sapiens
LADAQNPSL

SEQ ID NO: 154858 - protein, 9 aa, Homo Sapiens
LADAVAVTM

SEQ ID NO: 154859 - protein, 9 aa, Homo Sapiens
LADDDARLL

SEQ ID NO: 154860 - protein, 9 aa, Homo Sapiens
LADDDFLTV

SEQ ID NO: 154861 - protein, 9 aa, Homo Sapiens
LADDLNEKI

SEQ ID NO: 154862 - protein, 9 aa, Homo Sapiens
LADDSRVVT

SEQ ID NO: 154863 - protein, 9 aa, Homo Sapiens
LADDSVRSL

SEQ ID NO: 154864 - protein, 9 aa, Homo Sapiens
LADEAEVHL

SEQ ID NO: 154865 - protein, 9 aa, Homo Sapiens
LADEAFFSV

SEQ ID NO: 154866 - protein, 9 aa, Homo Sapiens
LADEFGVAV

SEQ ID NO: 154867 - protein, 9 aa, Homo Sapiens
LADEKVETV

SEQ ID NO: 154868 - protein, 9 aa, Homo Sapiens
LADELINAA

SEQ ID NO: 154869 - protein, 9 aa, Homo Sapiens
LADENREVL

SEQ ID NO: 154870 - protein, 9 aa, Homo Sapiens
LADERNELL

SEQ ID NO: 154871 - protein, 9 aa, Homo Sapiens
LADETLLKV

SEQ ID NO: 154872 - protein, 9 aa, Homo Sapiens
LADEVITVF

SEQ ID NO: 154873 - protein, 9 aa, Homo Sapiens
LADFEAGLL

SEQ ID NO: 154874 - protein, 9 aa, Homo Sapiens
LADFSPLTL

SEQ ID NO: 154875 - protein, 9 aa, Homo Sapiens
LADGADEHL

SEQ ID NO: 154876 - protein, 9 aa, Homo Sapiens
LADGLKVVL

SEQ ID NO: 154877 - protein, 9 aa, Homo Sapiens
LADGSIAVL

SEQ ID NO: 154878 - protein, 9 aa, Homo Sapiens
LADGVVSQA

SEQ ID NO: 154879 - protein, 9 aa, Homo Sapiens
LADGYDLEI

SEQ ID NO: 154880 - protein, 9 aa, Homo Sapiens
LADHPDAPM

SEQ ID NO: 154881 - protein, 9 aa, Homo Sapiens
LADHTVHVL

SEQ ID NO: 154882 - protein, 9 aa, Homo Sapiens
LADIAQSQL

SEQ ID NO: 154883 - protein, 9 aa, Homo Sapiens
LADILSESL

SEQ ID NO: 154884 - protein, 9 aa, Homo Sapiens
LADIQIEQL

SEQ ID NO: 154885 - protein, 9 aa, Homo Sapiens
LADKNVPNL

SEQ ID NO: 154886 - protein, 9 aa, Homo Sapiens
LADKSVLVC

SEQ ID NO: 154887 - protein, 9 aa, Homo Sapiens
LADLADFAL

SEQ ID NO: 154888 - protein, 9 aa, Homo Sapiens
LADLAKEEL

SEQ ID NO: 154889 - protein, 9 aa, Homo Sapiens
LADLENLAF

SEQ ID NO: 154890 - protein, 9 aa, Homo Sapiens
LADLGLDSL

SEQ ID NO: 154891 - protein, 9 aa, Homo Sapiens
LADLHPDVF

SEQ ID NO: 154892 - protein, 9 aa, Homo Sapiens
LADLIEKEL

SEQ ID NO: 154893 - protein, 9 aa, Homo Sapiens
LADLPQQLL

SEQ ID NO: 154894 - protein, 9 aa, Homo Sapiens
LADLQLEYL

SEQ ID NO: 154895 - protein, 9 aa, Homo Sapiens
LADLQNDEV

SEQ ID NO: 154896 - protein, 9 aa, Homo Sapiens
LADLSELQL

SEQ ID NO: 154897 - protein, 9 aa, Homo Sapiens
LADMHSTEI

SEQ ID NO: 154898 - protein, 9 aa, Homo Sapiens
LADPGIITI

SEQ ID NO: 154899 - protein, 9 aa, Homo Sapiens
LADPVFRTL

SEQ ID NO: 154900 - protein, 9 aa, Homo Sapiens
LADQMISRI

SEQ ID NO: 154901 - protein, 9 aa, Homo Sapiens
LADRNVTVL

SEQ ID NO: 154902 - protein, 9 aa, Homo Sapiens
LADSVGHHL

SEQ ID NO: 154903 - protein, 9 aa, Homo Sapiens
LADTQPAVL

SEQ ID NO: 154904 - protein, 9 aa, Homo Sapiens
LADTRATSV

SEQ ID NO: 154905 - protein, 9 aa, Homo Sapiens
LADVDPMQL

SEQ ID NO: 154906 - protein, 9 aa, Homo Sapiens
LADVIIHEI

SEQ ID NO: 154907 - protein, 9 aa, Homo Sapiens
LADVMSEQL

SEQ ID NO: 154908 - protein, 9 aa, Homo Sapiens
LADVPGEIL

SEQ ID NO: 154909 - protein, 9 aa, Homo Sapiens
LAEAESRVL

SEQ ID NO: 154910 - protein, 9 aa, Homo Sapiens
LAEDPKVTL

SEQ ID NO: 154911 - protein, 9 aa, Homo Sapiens
LAEDTRTEL

SEQ ID NO: 154912 - protein, 9 aa, Homo Sapiens
LAEEPEAVL

SEQ ID NO: 154913 - protein, 9 aa, Homo Sapiens
LAEESIVCL

SEQ ID NO: 154914 - protein, 9 aa, Homo Sapiens
LAEGSPRSL

SEQ ID NO: 154915 - protein, 9 aa, Homo Sapiens
LAEHPNVTL

SEQ ID NO: 154916 - protein, 9 aa, Homo Sapiens
LAEIAKAEL

SEQ ID NO: 154917 - protein, 9 aa, Homo Sapiens
LAEIAKVEL

SEQ ID NO: 154918 - protein, 9 aa, Homo Sapiens
LAEIGAVTL

SEQ ID NO: 154919 - protein, 9 aa, Homo Sapiens
LASEPQEVL

SEQ ID NO: 154920 - protein, 9 aa, Homo Sapiens
LFDEIDQAL

SEQ ID NO: 154921 - protein, 9 aa, Homo Sapiens
LGDDPTSSF

SEQ ID NO: 154922 - protein, 9 aa, Homo Sapiens
LGDLAITSL

SEQ ID NO: 154923 - protein, 9 aa, Homo Sapiens
LGDLSDSQL

SEQ ID NO: 154924 - protein, 9 aa, Homo Sapiens
LGDVGMAEL

SEQ ID NO: 154925 - protein, 9 aa, Homo Sapiens
LIDAGVDAL

SEQ ID NO: 154926 - protein, 9 aa, Homo Sapiens
LIDDLQHCL

SEQ ID NO: 154927 - protein, 9 aa, Homo Sapiens
LIDELNQAL

SEQ ID NO: 154928 - protein, 9 aa, Homo Sapiens
LIDEMVNTI

SEQ ID NO: 154929 - protein, 9 aa, Homo Sapiens
LIDEPSAYL

SEQ ID NO: 154930 - protein, 9 aa, Homo Sapiens
LIDEQILCV

SEQ ID NO: 154931 - protein, 9 aa, Homo Sapiens
LIDESVHAL

SEQ ID NO: 154932 - protein, 9 aa, Homo Sapiens
LIDFGSGAL

SEQ ID NO: 154933 - protein, 9 aa, Homo Sapiens
LIDIQPNTL

SEQ ID NO: 154934 - protein, 9 aa, Homo Sapiens
LIDKESASL

SEQ ID NO: 154935 - protein, 9 aa, Homo Sapiens
LIDKPNLQF

SEQ ID NO: 154936 - protein, 9 aa, Homo Sapiens
LIDKTTAAF

SEQ ID NO: 154937 - protein, 9 aa, Homo Sapiens
LIDLHNHDL

SEQ ID NO: 154938 - protein, 9 aa, Homo Sapiens
LIDLPGTEL

SEQ ID NO: 154939 - protein, 9 aa, Homo Sapiens
LIDLPTCEL

SEQ ID NO: 154940 - protein, 9 aa, Homo Sapiens
LIDMYSEVL

SEQ ID NO: 154941 - protein, 9 aa, Homo Sapiens
LIDNPNLVI

SEQ ID NO: 154942 - protein, 9 aa, Homo Sapiens
LIDQKVYEL

SEQ ID NO: 154943 - protein, 9 aa, Homo Sapiens
LIDVARTSL

SEQ ID NO: 154944 - protein, 9 aa, Homo Sapiens
LKDNPNQSL

SEQ ID NO: 154945 - protein, 9 aa, Homo Sapiens
LLDATQHTL

SEQ ID NO: 154946 - protein, 9 aa, Homo Sapiens
LLDDKAQAL

SEQ ID NO: 154947 - protein, 9 aa, Homo Sapiens
LLDEPTNML

SEQ ID NO: 154948 - protein, 9 aa, Homo Sapiens
LLDFPNIVI

SEQ ID NO: 154949 - protein, 9 aa, Homo Sapiens
LLDGSNVVF

SEQ ID NO: 154950 - protein, 9 aa, Homo Sapiens
LLDLGEVAL

SEQ ID NO: 154951 - protein, 9 aa, Homo Sapiens
LLDMPAAEL

SEQ ID NO: 154952 - protein, 9 aa, Homo Sapiens
LLDPDTAVL

SEQ ID NO: 154953 - protein, 9 aa, Homo Sapiens
LLDSPGKVL

SEQ ID NO: 154954 - protein, 9 aa, Homo Sapiens
LLDSRVMEL

SEQ ID NO: 154955 - protein, 9 aa, Homo Sapiens
LLDSSHSEL

SEQ ID NO: 154956 - protein, 9 aa, Homo Sapiens
LLDTVNNVF

SEQ ID NO: 154957 - protein, 9 aa, Homo Sapiens
LLDVAPLSL

SEQ ID NO: 154958 - protein, 9 aa, Homo Sapiens
LLDVPTAAV

SEQ ID NO: 154959 - protein, 9 aa, Homo Sapiens
LLDVTPLSL

SEQ ID NO: 154960 - protein, 9 aa, Homo Sapiens
LLDYPNNLL

SEQ ID NO: 154961 - protein, 9 aa, Homo Sapiens
LLDYPNNVL

SEQ ID NO: 154962 - protein, 9 aa, Homo Sapiens
LMDNPSLAF

SEQ ID NO: 154963 - protein, 9 aa, Homo Sapiens
LMDPPGTAL

SEQ ID NO: 154964 - protein, 9 aa, Homo Sapiens
LNDLQANSL

SEQ ID NO: 154965 - protein, 9 aa, Homo Sapiens
LNDPNKEAL

SEQ ID NO: 154966 - protein, 9 aa, Homo Sapiens
LNDVSNHTL

SEQ ID NO: 154967 - protein, 9 aa, Homo Sapiens
LPINGNGKQ

SEQ ID NO: 154968 - protein, 9 aa, Homo Sapiens
LQADYASQA

SEQ ID NO: 154969 - protein, 9 aa, Homo Sapiens
LQDFAQVTL

SEQ ID NO: 154970 - protein, 9 aa, Homo Sapiens
LQDFSQVTL

SEQ ID NO: 154971 - protein, 9 aa, Homo Sapiens
LQDLTFVHL

SEQ ID NO: 154972 - protein, 9 aa, Homo Sapiens
LQDQLRVAL

SEQ ID NO: 154973 - protein, 9 aa, Homo Sapiens
LSDDEIVSL

SEQ ID NO: 154974 - protein, 9 aa, Homo Sapiens
LSDDGKASL

SEQ ID NO: 154975 - protein, 9 aa, Homo Sapiens
LSDDHVLIL

SEQ ID NO: 154976 - protein, 9 aa, Homo Sapiens
LSDDIKESL

SEQ ID NO: 154977 - protein, 9 aa, Homo Sapiens
LSDDPTVSA

SEQ ID NO: 154978 - protein, 9 aa, Homo Sapiens
LSDEENLKL

SEQ ID NO: 154979 - protein, 9 aa, Homo Sapiens
LSDEHAGVI

SEQ ID NO: 154980 - protein, 9 aa, Homo Sapiens
LSDELRISL

SEQ ID NO: 154981 - protein, 9 aa, Homo Sapiens
LSDETLLEI

SEQ ID NO: 154982 - protein, 9 aa, Homo Sapiens
LSDGVVVQV

SEQ ID NO: 154983 - protein, 9 aa, Homo Sapiens
LSDHIQEEL

SEQ ID NO: 154984 - protein, 9 aa, Homo Sapiens
LSDIKGSVL

SEQ ID NO: 154985 - protein, 9 aa, Homo Sapiens
LSDISKIDL

SEQ ID NO: 154986 - protein, 9 aa, Homo Sapiens
LSDLAHFSL

SEQ ID NO: 154987 - protein, 9 aa, Homo Sapiens
LSDLALHFL

SEQ ID NO: 154988 - protein, 9 aa, Homo Sapiens
LSDLCGTVM

SEQ ID NO: 154989 - protein, 9 aa, Homo Sapiens
LSDLLEQTL

SEQ ID NO: 154990 - protein, 9 aa, Homo Sapiens
LSDLQVIKI

SEQ ID NO: 154991 - protein, 9 aa, Homo Sapiens
LSDLRVIDL

SEQ ID NO: 154992 - protein, 9 aa, Homo Sapiens
LSDLTGSLL

SEQ ID NO: 154993 - protein, 9 aa, Homo Sapiens
LSDPFYRTL

SEQ ID NO: 154994 - protein, 9 aa, Homo Sapiens
LSDPIVNTL

SEQ ID NO: 154995 - protein, 9 aa, Homo Sapiens
LSDPQVHTV

SEQ ID NO: 154996 - protein, 9 aa, Homo Sapiens
LSDPTYREL

SEQ ID NO: 154997 - protein, 9 aa, Homo Sapiens
LSDPVHLTV

SEQ ID NO: 154998 - protein, 9 aa, Homo Sapiens
LSDQSSVTL

SEQ ID NO: 154999 - protein, 9 aa, Homo Sapiens
LSDTGISAL

SEQ ID NO: 155000 - protein, 9 aa, Homo Sapiens
LSDTPNNHF

SEQ ID NO: 155001 - protein, 9 aa, Homo Sapiens
LSDTVRTVL

SEQ ID NO: 155002 - protein, 9 aa, Homo Sapiens
LSDVPTKCI

SEQ ID NO: 155003 - protein, 9 aa, Homo Sapiens
LSDYDILSL

SEQ ID NO: 155004 - protein, 9 aa, Homo Sapiens
LSDYGPPSL

SEQ ID NO: 155005 - protein, 9 aa, Homo Sapiens
LSEEQCREL

SEQ ID NO: 155006 - protein, 9 aa, Homo Sapiens
LSEHPNVTL

SEQ ID NO: 155007 - protein, 9 aa, Homo Sapiens
LSYLEKEAL

SEQ ID NO: 155008 - protein, 9 aa, Homo Sapiens
LTDDGNKWL

SEQ ID NO: 155009 - protein, 9 aa, Homo Sapiens
LTDDGRVFL

SEQ ID NO: 155010 - protein, 9 aa, Homo Sapiens
LTDDHVQFL

SEQ ID NO: 155011 - protein, 9 aa, Homo Sapiens
LTDEDTRNL

SEQ ID NO: 155012 - protein, 9 aa, Homo Sapiens
LTDEGVVAL

SEQ ID NO: 155013 - protein, 9 aa, Homo Sapiens
LTDEQIHHL

SEQ ID NO: 155014 - protein, 9 aa, Homo Sapiens
LTDEQRNEL

SEQ ID NO: 155015 - protein, 9 aa, Homo Sapiens
LTDESLSSL

SEQ ID NO: 155016 - protein, 9 aa, Homo Sapiens
LTDGHPLTL

SEQ ID NO: 155017 - protein, 9 aa, Homo Sapiens
LTDGPNERI

SEQ ID NO: 155018 - protein, 9 aa, Homo Sapiens
LTDIHGNVL

SEQ ID NO: 155019 - protein, 9 aa, Homo Sapiens
LTDKSCQSF

SEQ ID NO: 155020 - protein, 9 aa, Homo Sapiens
LTDRDLCEL

SEQ ID NO: 155021 - protein, 9 aa, Homo Sapiens
LTDSPKPAL

SEQ ID NO: 155022 - protein, 9 aa, Homo Sapiens
LTDTEIMTL

SEQ ID NO: 155023 - protein, 9 aa, Homo Sapiens
LTDTPDTTA

SEQ ID NO: 155024 - protein, 9 aa, Homo Sapiens
LTDVGFTTL

SEQ ID NO: 155025 - protein, 9 aa, Homo Sapiens
LTDVMLHAL

SEQ ID NO: 155026 - protein, 9 aa, Homo Sapiens
LTDVNVVAV

SEQ ID NO: 155027 - protein, 9 aa, Homo Sapiens
LTEDPHTVL

SEQ ID NO: 155028 - protein, 9 aa, Homo Sapiens
LVDAPCSDL

SEQ ID NO: 155029 - protein, 9 aa, Homo Sapiens
LVDDHFVEL

SEQ ID NO: 155030 - protein, 9 aa, Homo Sapiens
LVDDLVDSL

SEQ ID NO: 155031 - protein, 9 aa, Homo Sapiens
LVDEAKNYL

SEQ ID NO: 155032 - protein, 9 aa, Homo Sapiens
LVDENFTEL

SEQ ID NO: 155033 - protein, 9 aa, Homo Sapiens
LVDGPCTQV

SEQ ID NO: 155034 - protein, 9 aa, Homo Sapiens
LVDGQIFCL

SEQ ID NO: 155035 - protein, 9 aa, Homo Sapiens
LVDPDTAVL

SEQ ID NO: 155036 - protein, 9 aa, Homo Sapiens
LVDRSCTVL

SEQ ID NO: 155037 - protein, 9 aa, Homo Sapiens
LVDSSGHSV

SEQ ID NO: 155038 - protein, 9 aa, Homo Sapiens
LVDTPPSAL

SEQ ID NO: 155039 - protein, 9 aa, Homo Sapiens
LVDVVTGQL

SEQ ID NO: 155040 - protein, 9 aa, Homo Sapiens
LVEDLSESL

SEQ ID NO: 155041 - protein, 9 aa, Homo Sapiens
LVEPPPMSL

SEQ ID NO: 155042 - protein, 9 aa, Homo Sapiens
LWDEVLSHL

SEQ ID NO: 155043 - protein, 9 aa, Homo Sapiens
MADAGILRL

SEQ ID NO: 155044 - protein, 9 aa, Homo Sapiens
MADEAGLDL

SEQ ID NO: 155045 - protein, 9 aa, Homo Sapiens
MADGNQAQL

SEQ ID NO: 155046 - protein, 9 aa, Homo Sapiens
MADIGGHAI

SEQ ID NO: 155047 - protein, 9 aa, Homo Sapiens
MADIPGHVF

SEQ ID NO: 155048 - protein, 9 aa, Homo Sapiens
MADKCSPTL

SEQ ID NO: 155049 - protein, 9 aa, Homo Sapiens
MADLEGLHL

SEQ ID NO: 155050 - protein, 9 aa, Homo Sapiens
MADLEQKVL

SEQ ID NO: 155051 - protein, 9 aa, Homo Sapiens
MADPEVQQI

SEQ ID NO: 155052 - protein, 9 aa, Homo Sapiens
MADSDFLAL

SEQ ID NO: 155053 - protein, 9 aa, Homo Sapiens
MADTFLEHM

SEQ ID NO: 155054 - protein, 9 aa, Homo Sapiens
MAEERAESL

SEQ ID NO: 155055 - protein, 9 aa, Homo Sapiens
MAEIFGTEL

SEQ ID NO: 155056 - protein, 9 aa, Homo Sapiens
MAESPSRDV

SEQ ID NO: 155057 - protein, 9 aa, Homo Sapiens
MAETKGVAL

SEQ ID NO: 155058 - protein, 9 aa, Homo Sapiens
MGDDYILDL

SEQ ID NO: 155059 - protein, 9 aa, Homo Sapiens
MIDERQQEL

SEQ ID NO: 155060 - protein, 9 aa, Homo Sapiens
MIDETRNSL

SEQ ID NO: 155061 - protein, 9 aa, Homo Sapiens
MIDRDNSVF

SEQ ID NO: 155062 - protein, 9 aa, Homo Sapiens
MLDEPTNHL

SEQ ID NO: 155063 - protein, 9 aa, Homo Sapiens
MLDFENQTL

SEQ ID NO: 155064 - protein, 9 aa, Homo Sapiens
MLDFYSDKN

SEQ ID NO: 155065 - protein, 9 aa, Homo Sapiens
MLDLQGAAL

SEQ ID NO: 155066 - protein, 9 aa, Homo Sapiens
MNDDARTEL

SEQ ID NO: 155067 - protein, 9 aa, Homo Sapiens
MNDDITTSL

SEQ ID NO: 155068 - protein, 9 aa, Homo Sapiens
MNDGPHSAL

SEQ ID NO: 155069 - protein, 9 aa, Homo Sapiens
MNDMTAVAL

SEQ ID NO: 155070 - protein, 9 aa, Homo Sapiens
MPDSAAALL

SEQ ID NO: 155071 - protein, 9 aa, Homo Sapiens
MQDIVLNEV

SEQ ID NO: 155072 - protein, 9 aa, Homo Sapiens
MQDMVKDAL

SEQ ID NO: 155073 - protein, 9 aa, Homo Sapiens
MSDLPVKVI

SEQ ID NO: 155074 - protein, 9 aa, Homo Sapiens
MSDTTFKAL

SEQ ID NO: 155075 - protein, 9 aa, Homo Sapiens
MTDDKITEV

SEQ ID NO: 155076 - protein, 9 aa, Homo Sapiens
MTDGAQQAL

SEQ ID NO: 155077 - protein, 9 aa, Homo Sapiens
MTDPEMVEV

SEQ ID NO: 155078 - protein, 9 aa, Homo Sapiens
MVDDRLVTM

SEQ ID NO: 155079 - protein, 9 aa, Homo Sapiens
MVDENFSTL

SEQ ID NO: 155080 - protein, 9 aa, Homo Sapiens
MVDERTDYL

SEQ ID NO: 155081 - protein, 9 aa, Homo Sapiens
MVDGKPVNL

SEQ ID NO: 155082 - protein, 9 aa, Homo Sapiens
MVEEIGVEL

SEQ ID NO: 155083 - protein, 9 aa, Homo Sapiens
NADAIVVKL

SEQ ID NO: 155084 - protein, 9 aa, Homo Sapiens
NADETPICL

SEQ ID NO: 155085 - protein, 9 aa, Homo Sapiens
NADFAKLFL

SEQ ID NO: 155086 - protein, 9 aa, Homo Sapiens
NADGKIISL

SEQ ID NO: 155087 - protein, 9 aa, Homo Sapiens
NADHTTLLL

SEQ ID NO: 155088 - protein, 9 aa, Homo Sapiens
NADIAVVEM

SEQ ID NO: 155089 - protein, 9 aa, Homo Sapiens
NADIFRGLT

SEQ ID NO: 155090 - protein, 9 aa, Homo Sapiens
NADISGMKV

SEQ ID NO: 155091 - protein, 9 aa, Homo Sapiens
NADISQSLL

SEQ ID NO: 155092 - protein, 9 aa, Homo Sapiens
NADLFRGTL

SEQ ID NO: 155093 - protein, 9 aa, Homo Sapiens
NADLINRVL

SEQ ID NO: 155094 - protein, 9 aa, Homo Sapiens
NADLIQVAF

SEQ ID NO: 155095 - protein, 9 aa, Homo Sapiens
NADLPIATA

SEQ ID NO: 155096 - protein, 9 aa, Homo Sapiens
NADLRPSKL

SEQ ID NO: 155097 - protein, 9 aa, Homo Sapiens
NADPASHEI

SEQ ID NO: 155098 - protein, 9 aa, Homo Sapiens
NADPILISL

SEQ ID NO: 155099 - protein, 9 aa, Homo Sapiens
NADPLEVML

SEQ ID NO: 155100 - protein, 9 aa, Homo Sapiens
NADPQAVTM

SEQ ID NO: 155101 - protein, 9 aa, Homo Sapiens
NADQLASKL

SEQ ID NO: 155102 - protein, 9 aa, Homo Sapiens
NADQQNFTV

SEQ ID NO: 155103 - protein, 9 aa, Homo Sapiens
NADSATRLL

SEQ ID NO: 155104 - protein, 9 aa, Homo Sapiens
NADSKALDL

SEQ ID NO: 155105 - protein, 9 aa, Homo Sapiens
NADSQFWSL

SEQ ID NO: 155106 - protein, 9 aa, Homo Sapiens
NADSSNTAL

SEQ ID NO: 155107 - protein, 9 aa, Homo Sapiens
NADTLALVF

SEQ ID NO: 155108 - protein, 9 aa, Homo Sapiens
NADTVSSKL

SEQ ID NO: 155109 - protein, 9 aa, Homo Sapiens
NADVALQNL

SEQ ID NO: 155110 - protein, 9 aa, Homo Sapiens
NADVALVNF

SEQ ID NO: 155111 - protein, 9 aa, Homo Sapiens
NADVPEQLI

SEQ ID NO: 155112 - protein, 9 aa, Homo Sapiens
NADVQERLL

SEQ ID NO: 155113 - protein, 9 aa, Homo Sapiens
NADVQSIAV

SEQ ID NO: 155114 - protein, 9 aa, Homo Sapiens
NADYVAAFL

SEQ ID NO: 155115 - protein, 9 aa, Homo Sapiens
NAEPEPRSL

SEQ ID NO: 155116 - protein, 9 aa, Homo Sapiens
NAEQHVTQL

SEQ ID NO: 155117 - protein, 9 aa, Homo Sapiens
NAETFGIPL

SEQ ID NO: 155118 - protein, 9 aa, Homo Sapiens
NALDLNSVL

SEQ ID NO: 155119 - protein, 9 aa, Homo Sapiens
NFDGHVVLP

SEQ ID NO: 155120 - protein, 9 aa, Homo Sapiens
NGDISSLEL

SEQ ID NO: 155121 - protein, 9 aa, Homo Sapiens
NGDTPNLSF

SEQ ID NO: 155122 - protein, 9 aa, Homo Sapiens
NIDAHNTSV

SEQ ID NO: 155123 - protein, 9 aa, Homo Sapiens
NIDEGPLAF

SEQ ID NO: 155124 - protein, 9 aa, Homo Sapiens
NIDEIYKAL

SEQ ID NO: 155125 - protein, 9 aa, Homo Sapiens
NIDFMPTIL

SEQ ID NO: 155126 - protein, 9 aa, Homo Sapiens
NIDINNNEL

SEQ ID NO: 155127 - protein, 9 aa, Homo Sapiens
NIDIQNGFL

SEQ ID NO: 155128 - protein, 9 aa, Homo Sapiens
NIDLAVQCL

SEQ ID NO: 155129 - protein, 9 aa, Homo Sapiens
NIDLVVKEL

SEQ ID NO: 155130 - protein, 9 aa, Homo Sapiens
NIDVVGVSF

SEQ ID NO: 155131 - protein, 9 aa, Homo Sapiens
NIDYTVHSV

SEQ ID NO: 155132 - protein, 9 aa, Homo Sapiens
NIESPTSIL

SEQ ID NO: 155133 - protein, 9 aa, Homo Sapiens
NLDATVTAL

SEQ ID NO: 155134 - protein, 9 aa, Homo Sapiens
NLDENGLDL

SEQ ID NO: 155135 - protein, 9 aa, Homo Sapiens
NLDETSEIL

SEQ ID NO: 155136 - protein, 9 aa, Homo Sapiens
NLDLAVLEL

SEQ ID NO: 155137 - protein, 9 aa, Homo Sapiens
NLDLQHNEL

SEQ ID NO: 155138 - protein, 9 aa, Homo Sapiens
NLDNSSSHL

SEQ ID NO: 155139 - protein, 9 aa, Homo Sapiens
NMDCPNHGF

SEQ ID NO: 155140 - protein, 9 aa, Homo Sapiens
NMDSPGPML

SEQ ID NO: 155141 - protein, 9 aa, Homo Sapiens
NQDLALSNL

SEQ ID NO: 155142 - protein, 9 aa, Homo Sapiens
NQDLTFQHI

SEQ ID NO: 155143 - protein, 9 aa, Homo Sapiens
NSDADPLCL

SEQ ID NO: 155144 - protein, 9 aa, Homo Sapiens
NSDDIGVFL

SEQ ID NO: 155145 - protein, 9 aa, Homo Sapiens
NSDGLIASL

SEQ ID NO: 155146 - protein, 9 aa, Homo Sapiens
NSDGRQQIL

SEQ ID NO: 155147 - protein, 9 aa, Homo Sapiens
NSDGYPDSL

SEQ ID NO: 155148 - protein, 9 aa, Homo Sapiens
NSDINEWSL

SEQ ID NO: 155149 - protein, 9 aa, Homo Sapiens
NSDLVLQTL

SEQ ID NO: 155150 - protein, 9 aa, Homo Sapiens
NSDPETPVL

SEQ ID NO: 155151 - protein, 9 aa, Homo Sapiens
NSDPYSVAL

SEQ ID NO: 155152 - protein, 9 aa, Homo Sapiens
NSDSPQQVL

SEQ ID NO: 155153 - protein, 9 aa, Homo Sapiens
NSDTHSSTF

SEQ ID NO: 155154 - protein, 9 aa, Homo Sapiens
NSDTSVETL

SEQ ID NO: 155155 - protein, 9 aa, Homo Sapiens
NSDTTSPEL

SEQ ID NO: 155156 - protein, 9 aa, Homo Sapiens
NTDEPPMVF

SEQ ID NO: 155157 - protein, 9 aa, Homo Sapiens
NTDGKTLPS

SEQ ID NO: 155158 - protein, 9 aa, Homo Sapiens
NTDISILSL

SEQ ID NO: 155159 - protein, 9 aa, Homo Sapiens
NTDSSPRCL

SEQ ID NO: 155160 - protein, 9 aa, Homo Sapiens
NTDSVHLAL

SEQ ID NO: 155161 - protein, 9 aa, Homo Sapiens
NVDAGKSTL

SEQ ID NO: 155162 - protein, 9 aa, Homo Sapiens
NVDDCGFSL

SEQ ID NO: 155163 - protein, 9 aa, Homo Sapiens
NVDDPTGNF

SEQ ID NO: 155164 - protein, 9 aa, Homo Sapiens
NVDENVAEL

SEQ ID NO: 155165 - protein, 9 aa, Homo Sapiens
NVDGHLYEL

SEQ ID NO: 155166 - protein, 9 aa, Homo Sapiens
NVDIPDVPL

SEQ ID NO: 155167 - protein, 9 aa, Homo Sapiens
NVDPDNVVL

SEQ ID NO: 155168 - protein, 9 aa, Homo Sapiens
NVDPDSVVL

SEQ ID NO: 155169 - protein, 9 aa, Homo Sapiens
NVDQAFHEL

SEQ ID NO: 155170 - protein, 9 aa, Homo Sapiens
NVDQAVATL

SEQ ID NO: 155171 - protein, 9 aa, Homo Sapiens
NVDSGKSTL

SEQ ID NO: 155172 - protein, 9 aa, Homo Sapiens
NVDSNNKEL

SEQ ID NO: 155173 - protein, 9 aa, Homo Sapiens
NVDTPVSTL

SEQ ID NO: 155174 - protein, 9 aa, Homo Sapiens
NVEEAFFTL

SEQ ID NO: 155175 - protein, 9 aa, Homo Sapiens
NVENAFFTL

SEQ ID NO: 155176 - protein, 9 aa, Homo Sapiens
PADEPRTVL

SEQ ID NO: 155177 - protein, 9 aa, Homo Sapiens
QADAPNPGL

SEQ ID NO: 155178 - protein, 9 aa, Homo Sapiens
QADAPNPSL

SEQ ID NO: 155179 - protein, 9 aa, Homo Sapiens
QADARQVVL

SEQ ID NO: 155180 - protein, 9 aa, Homo Sapiens
QADCAVLIV

SEQ ID NO: 155181 - protein, 9 aa, Homo Sapiens
QADEVIAIL

SEQ ID NO: 155182 - protein, 9 aa, Homo Sapiens
QADFAIEAL

SEQ ID NO: 155183 - protein, 9 aa, Homo Sapiens
QADFEAHNI

SEQ ID NO: 155184 - protein, 9 aa, Homo Sapiens
QADFKPATL

SEQ ID NO: 155185 - protein, 9 aa, Homo Sapiens
QADIALIGL

SEQ ID NO: 155186 - protein, 9 aa, Homo Sapiens
QADICVREI

SEQ ID NO: 155187 - protein, 9 aa, Homo Sapiens
QADIEVRAL

SEQ ID NO: 155188 - protein, 9 aa, Homo Sapiens
QADLAVLVI

SEQ ID NO: 155189 - protein, 9 aa, Homo Sapiens
QADLSNLHL

SEQ ID NO: 155190 - protein, 9 aa, Homo Sapiens
QADNPHVAL

SEQ ID NO: 155191 - protein, 9 aa, Homo Sapiens
QADPSAPCL

SEQ ID NO: 155192 - protein, 9 aa, Homo Sapiens
QADPTKLEL

SEQ ID NO: 155193 - protein, 9 aa, Homo Sapiens
QADQEAKEL

SEQ ID NO: 155194 - protein, 9 aa, Homo Sapiens
QADQTFISL

SEQ ID NO: 155195 - protein, 9 aa, Homo Sapiens
QADSGRVLL

SEQ ID NO: 155196 - protein, 9 aa, Homo Sapiens
QADSLERSL

SEQ ID NO: 155197 - protein, 9 aa, Homo Sapiens
QADTPALSL

SEQ ID NO: 155198 - protein, 9 aa, Homo Sapiens
QADTTRLEL

SEQ ID NO: 155199 - protein, 9 aa, Homo Sapiens
QADVAVLVV

SEQ ID NO: 155200 - protein, 9 aa, Homo Sapiens
QADYGLEHL

SEQ ID NO: 155201 - protein, 9 aa, Homo Sapiens
QAEDGKTEL

SEQ ID NO: 155202 - protein, 9 aa, Homo Sapiens
QAERPDTML

SEQ ID NO: 155203 - protein, 9 aa, Homo Sapiens
QGDGPSRNL

SEQ ID NO: 155204 - protein, 9 aa, Homo Sapiens
QIDELVTRI

SEQ ID NO: 155205 - protein, 9 aa, Homo Sapiens
QIDFPTSAF

SEQ ID NO: 155206 - protein, 9 aa, Homo Sapiens
QIDIGGVTL

SEQ ID NO: 155207 - protein, 9 aa, Homo Sapiens
QIDQINTDL

SEQ ID NO: 155208 - protein, 9 aa, Homo Sapiens
QLDAENLEL

SEQ ID NO: 155209 - protein, 9 aa, Homo Sapiens
QLDIIIHSL

SEQ ID NO: 155210 - protein, 9 aa, Homo Sapiens
QLDLENTEL

SEQ ID NO: 155211 - protein, 9 aa, Homo Sapiens
QLDVSSNEL

SEQ ID NO: 155212 - protein, 9 aa, Homo Sapiens
QNDLGQTAL

SEQ ID NO: 155213 - protein, 9 aa, Homo Sapiens
QQDYFPKAL

SEQ ID NO: 155214 - protein, 9 aa, Homo Sapiens
QSDDPPIIL

SEQ ID NO: 155215 - protein, 9 aa, Homo Sapiens
QSDIPSSLL

SEQ ID NO: 155216 - protein, 9 aa, Homo Sapiens
QSDLGYNSL

SEQ ID NO: 155217 - protein, 9 aa, Homo Sapiens
QSDPSGAYF

SEQ ID NO: 155218 - protein, 9 aa, Homo Sapiens
QSDPVGPAL

SEQ ID NO: 155219 - protein, 9 aa, Homo Sapiens
QSDVYTHVL

SEQ ID NO: 155220 - protein, 9 aa, Homo Sapiens
QTDIPFTRL

SEQ ID NO: 155221 - protein, 9 aa, Homo Sapiens
QTDPPRSSL

SEQ ID NO: 155222 - protein, 9 aa, Homo Sapiens
QTDQPETVI

SEQ ID NO: 155223 - protein, 9 aa, Homo Sapiens
QVDNPVSVL

SEQ ID NO: 155224 - protein, 9 aa, Homo Sapiens
QWDLVENYL

SEQ ID NO: 155225 - protein, 9 aa, Homo Sapiens
RADADTVLL

SEQ ID NO: 155226 - protein, 9 aa, Homo Sapiens
RADAGPLCA

SEQ ID NO: 155227 - protein, 9 aa, Homo Sapiens
RADAPVALV

SEQ ID NO: 155228 - protein, 9 aa, Homo Sapiens
RADDTFEAL

SEQ ID NO: 155229 - protein, 9 aa, Homo Sapiens
RADEDARMI

SEQ ID NO: 155230 - protein, 9 aa, Homo Sapiens
RADEKITNI

SEQ ID NO: 155231 - protein, 9 aa, Homo Sapiens
RADESTYVL

SEQ ID NO: 155232 - protein, 9 aa, Homo Sapiens
RADGENTAF

SEQ ID NO: 155233 - protein, 9 aa, Homo Sapiens
RADHVFICF

SEQ ID NO: 155234 - protein, 9 aa, Homo Sapiens
RADIGAASL

SEQ ID NO: 155235 - protein, 9 aa, Homo Sapiens
RADILQVGL

SEQ ID NO: 155236 - protein, 9 aa, Homo Sapiens
RADKPWTRL

SEQ ID NO: 155237 - protein, 9 aa, Homo Sapiens
RADLIEVVM

SEQ ID NO: 155238 - protein, 9 aa, Homo Sapiens
RADLQATAL

SEQ ID NO: 155239 - protein, 9 aa, Homo Sapiens
RADLTYAEF

SEQ ID NO: 155240 - protein, 9 aa, Homo Sapiens
RADMLEMEL

SEQ ID NO: 155241 - protein, 9 aa, Homo Sapiens
RADPESPIL

SEQ ID NO: 155242 - protein, 9 aa, Homo Sapiens
RADREVAIY

SEQ ID NO: 155243 - protein, 9 aa, Homo Sapiens
RADSSRASL

SEQ ID NO: 155244 - protein, 9 aa, Homo Sapiens
RADSVGKLV

SEQ ID NO: 155245 - protein, 9 aa, Homo Sapiens
RADTFPQVL

SEQ ID NO: 155246 - protein, 9 aa, Homo Sapiens
RADTGHAFL

SEQ ID NO: 155247 - protein, 9 aa, Homo Sapiens
RADTGQERF

SEQ ID NO: 155248 - protein, 9 aa, Homo Sapiens
RADTQAQAL

SEQ ID NO: 155249 - protein, 9 aa, Homo Sapiens
RADVKGGTL

SEQ ID NO: 155250 - protein, 9 aa, Homo Sapiens
RADVSLTTL

SEQ ID NO: 155251 - protein, 9 aa, Homo Sapiens
RADYDNLVL

SEQ ID NO: 155252 - protein, 9 aa, Homo Sapiens
RAEDNADTL

SEQ ID NO: 155253 - protein, 9 aa, Homo Sapiens
RAEEAAGQL

SEQ ID NO: 155254 - protein, 9 aa, Homo Sapiens
RAEEGFTQV

SEQ ID NO: 155255 - protein, 9 aa, Homo Sapiens
RAEELGQEL

SEQ ID NO: 155256 - protein, 9 aa, Homo Sapiens
RAELASAAL

SEQ ID NO: 155257 - protein, 9 aa, Homo Sapiens
RAELHPVEL

SEQ ID NO: 155258 - protein, 9 aa, Homo Sapiens
RATNEGLSL

SEQ ID NO: 155259 - protein, 9 aa, Homo Sapiens
RFDVHDVTL

SEQ ID NO: 155260 - protein, 9 aa, Homo Sapiens
RGDDTPLHL

SEQ ID NO: 155261 - protein, 9 aa, Homo Sapiens
RGDSVIVVL

SEQ ID NO: 155262 - protein, 9 aa, Homo Sapiens
RGDTLLQAL

SEQ ID NO: 155263 - protein, 9 aa, Homo Sapiens
RGDWPGVVL

SEQ ID NO: 155264 - protein, 9 aa, Homo Sapiens
RIDDLQMVL

SEQ ID NO: 155265 - protein, 9 aa, Homo Sapiens
RIDEARQEL

SEQ ID NO: 155266 - protein, 9 aa, Homo Sapiens
RIDEINKEL

SEQ ID NO: 155267 - protein, 9 aa, Homo Sapiens
RIDQVNQLL

SEQ ID NO: 155268 - protein, 9 aa, Homo Sapiens
RLDDAIHVL

SEQ ID NO: 155269 - protein, 9 aa, Homo Sapiens
RLDEVSREL

SEQ ID NO: 155270 - protein, 9 aa, Homo Sapiens
RLDIAGRDI

SEQ ID NO: 155271 - protein, 9 aa, Homo Sapiens
RLDQPMTEI

SEQ ID NO: 155272 - protein, 9 aa, Homo Sapiens
RLDTGPQSL

SEQ ID NO: 155273 - protein, 9 aa, Homo Sapiens
RLDWPVRTL

SEQ ID NO: 155274 - protein, 9 aa, Homo Sapiens
RNDASEVVL

SEQ ID NO: 155275 - protein, 9 aa, Homo Sapiens
RQDAVHAIL

SEQ ID NO: 155276 - protein, 9 aa, Homo Sapiens
RQDEIKNKL

SEQ ID NO: 155277 - protein, 9 aa, Homo Sapiens
RQDFSPEEL

SEQ ID NO: 155278 - protein, 9 aa, Homo Sapiens
RQDLTTLDV

SEQ ID NO: 155279 - protein, 9 aa, Homo Sapiens
RQDNKCLEL

SEQ ID NO: 155280 - protein, 9 aa, Homo Sapiens
RQDVATNLL

SEQ ID NO: 155281 - protein, 9 aa, Homo Sapiens
RQDVDNASL

SEQ ID NO: 155282 - protein, 9 aa, Homo Sapiens
RSDASSPTI

SEQ ID NO: 155283 - protein, 9 aa, Homo Sapiens
RSDELTRHF

SEQ ID NO: 155284 - protein, 9 aa, Homo Sapiens
RSDGEAELL

SEQ ID NO: 155285 - protein, 9 aa, Homo Sapiens
RSDKPIFTL

SEQ ID NO: 155286 - protein, 9 aa, Homo Sapiens
RSDLKAEAL

SEQ ID NO: 155287 - protein, 9 aa, Homo Sapiens
RSDLYAVEM

SEQ ID NO: 155288 - protein, 9 aa, Homo Sapiens
RSDQASISL

SEQ ID NO: 155289 - protein, 9 aa, Homo Sapiens
RSDSYISQL

SEQ ID NO: 155290 - protein, 9 aa, Homo Sapiens
RSDTAQVEL

SEQ ID NO: 155291 - protein, 9 aa, Homo Sapiens
RSDTSSPEV

SEQ ID NO: 155292 - protein, 9 aa, Homo Sapiens
RTDAGVHAL

SEQ ID NO: 155293 - protein, 9 aa, Homo Sapiens
RTDDNCIVL

SEQ ID NO: 155294 - protein, 9 aa, Homo Sapiens
RTDDTPVVL

SEQ ID NO: 155295 - protein, 9 aa, Homo Sapiens
RTDEIGVAF

SEQ ID NO: 155296 - protein, 9 aa, Homo Sapiens
RTDMENLVL

SEQ ID NO: 155297 - protein, 9 aa, Homo Sapiens
RTDNTCVNL

SEQ ID NO: 155298 - protein, 9 aa, Homo Sapiens
RTDPVPVTI

SEQ ID NO: 155299 - protein, 9 aa, Homo Sapiens
RTDRPNFEL

SEQ ID NO: 155300 - protein, 9 aa, Homo Sapiens
RTDVPGELL

SEQ ID NO: 155301 - protein, 9 aa, Homo Sapiens
RVDDIFSDL

SEQ ID NO: 155302 - protein, 9 aa, Homo Sapiens
RVDDPQDVF

SEQ ID NO: 155303 - protein, 9 aa, Homo Sapiens
RVDDVYSVL

SEQ ID NO: 155304 - protein, 9 aa, Homo Sapiens
RVDEEPTTL

SEQ ID NO: 155305 - protein, 9 aa, Homo Sapiens
RVDELTTDL

SEQ ID NO: 155306 - protein, 9 aa, Homo Sapiens
RVDKITEYL

SEQ ID NO: 155307 - protein, 9 aa, Homo Sapiens
RVDKNAPTV

SEQ ID NO: 155308 - protein, 9 aa, Homo Sapiens
RVDLPLAVL

SEQ ID NO: 155309 - protein, 9 aa, Homo Sapiens
RVDNFVIAL

SEQ ID NO: 155310 - protein, 9 aa, Homo Sapiens
SAAFPGASL

SEQ ID NO: 155311 - protein, 9 aa, Homo Sapiens
SAAGPGFSL

SEQ ID NO: 155312 - protein, 9 aa, Homo Sapiens
SAAMPGASL

SEQ ID NO: 155313 - protein, 9 aa, Homo Sapiens
SAAPEGVPL

SEQ ID NO: 155314 - protein, 9 aa, Homo Sapiens
SAAPPEPAV

SEQ ID NO: 155315 - protein, 9 aa, Homo Sapiens
SAAPPGLEA

SEQ ID NO: 155316 - protein, 9 aa, Homo Sapiens
SADACHAEL

SEQ ID NO: 155317 - protein, 9 aa, Homo Sapiens
SADAPMFVM

SEQ ID NO: 155318 - protein, 9 aa, Homo Sapiens
SADARSFEM

SEQ ID NO: 155319 - protein, 9 aa, Homo Sapiens
SADASQRSL

SEQ ID NO: 155320 - protein, 9 aa, Homo Sapiens
SADASVNTL

SEQ ID NO: 155321 - protein, 9 aa, Homo Sapiens
SADCRENVI

SEQ ID NO: 155322 - protein, 9 aa, Homo Sapiens
SADDAEVVL

SEQ ID NO: 155323 - protein, 9 aa, Homo Sapiens
SADDFAMEM

SEQ ID NO: 155324 - protein, 9 aa, Homo Sapiens
SADDFLPTL

SEQ ID NO: 155325 - protein, 9 aa, Homo Sapiens
SADDGIRNL

SEQ ID NO: 155326 - protein, 9 aa, Homo Sapiens
SADDIGTLI

SEQ ID NO: 155327 - protein, 9 aa, Homo Sapiens
SADDKTVRL

SEQ ID NO: 155328 - protein, 9 aa, Homo Sapiens
SADDLLKTL

SEQ ID NO: 155329 - protein, 9 aa, Homo Sapiens
SADDWSEHI

SEQ ID NO: 155330 - protein, 9 aa, Homo Sapiens
SADEAHGLL

SEQ ID NO: 155331 - protein, 9 aa, Homo Sapiens
SADEGQTVF

SEQ ID NO: 155332 - protein, 9 aa, Homo Sapiens
SADELQKML

SEQ ID NO: 155333 - protein, 9 aa, Homo Sapiens
SADELVTRI

SEQ ID NO: 155334 - protein, 9 aa, Homo Sapiens
SADEPMTTF

SEQ ID NO: 155335 - protein, 9 aa, Homo Sapiens
SADERILVI

SEQ ID NO: 155336 - protein, 9 aa, Homo Sapiens
SADERQRML

SEQ ID NO: 155337 - protein, 9 aa, Homo Sapiens
SADESGQIF

SEQ ID NO: 155338 - protein, 9 aa, Homo Sapiens
SADEVMRFF

SEQ ID NO: 155339 - protein, 9 aa, Homo Sapiens
SADEVQRFF

SEQ ID NO: 155340 - protein, 9 aa, Homo Sapiens
SADFAELEV

SEQ ID NO: 155341 - protein, 9 aa, Homo Sapiens
SADFETVRM

SEQ ID NO: 155342 - protein, 9 aa, Homo Sapiens
SADFPALVV

SEQ ID NO: 155343 - protein, 9 aa, Homo Sapiens
SADFPRVGM

SEQ ID NO: 155344 - protein, 9 aa, Homo Sapiens
SADFSPAFL

SEQ ID NO: 155345 - protein, 9 aa, Homo Sapiens
SADFTSENF

SEQ ID NO: 155346 - protein, 9 aa, Homo Sapiens
SADFVVEAI

SEQ ID NO: 155347 - protein, 9 aa, Homo Sapiens
SADFVVESI

SEQ ID NO: 155348 - protein, 9 aa, Homo Sapiens
SADGMRLAL

SEQ ID NO: 155349 - protein, 9 aa, Homo Sapiens
SADHLAHEV

SEQ ID NO: 155350 - protein, 9 aa, Homo Sapiens
SADIARAEV

SEQ ID NO: 155351 - protein, 9 aa, Homo Sapiens
SADIIHRDL

SEQ ID NO: 155352 - protein, 9 aa, Homo Sapiens
SADISGLNL

SEQ ID NO: 155353 - protein, 9 aa, Homo Sapiens
SADISLERL

SEQ ID NO: 155354 - protein, 9 aa, Homo Sapiens
SADITFATL

SEQ ID NO: 155355 - protein, 9 aa, Homo Sapiens
SADKEIMSL

SEQ ID NO: 155356 - protein, 9 aa, Homo Sapiens
SADKFQVLL

SEQ ID NO: 155357 - protein, 9 aa, Homo Sapiens
SADKGSLEV

SEQ ID NO: 155358 - protein, 9 aa, Homo Sapiens
SADKPDSVL

SEQ ID NO: 155359 - protein, 9 aa, Homo Sapiens
SADKPLSNM

SEQ ID NO: 155360 - protein, 9 aa, Homo Sapiens
SADLEVLDL

SEQ ID NO: 155361 - protein, 9 aa, Homo Sapiens
SADLIIQEF

SEQ ID NO: 155362 - protein, 9 aa, Homo Sapiens
SADLIKEKL

SEQ ID NO: 155363 - protein, 9 aa, Homo Sapiens
SADLKELSL

SEQ ID NO: 155364 - protein, 9 aa, Homo Sapiens
SADLPESTL

SEQ ID NO: 155365 - protein, 9 aa, Homo Sapiens
SADLRADAM

SEQ ID NO: 155366 - protein, 9 aa, Homo Sapiens
SADLYYTSF

SEQ ID NO: 155367 - protein, 9 aa, Homo Sapiens
SADMSHVAL

SEQ ID NO: 155368 - protein, 9 aa, Homo Sapiens
SADNVRQQL

SEQ ID NO: 155369 - protein, 9 aa, Homo Sapiens
SADPEVMLL

SEQ ID NO: 155370 - protein, 9 aa, Homo Sapiens
SADPGILVL

SEQ ID NO: 155371 - protein, 9 aa, Homo Sapiens
SADPGVFVL

SEQ ID NO: 155372 - protein, 9 aa, Homo Sapiens
SADPLNSAF

SEQ ID NO: 155373 - protein, 9 aa, Homo Sapiens
SADPNVVDL

SEQ ID NO: 155374 - protein, 9 aa, Homo Sapiens
SADPRHILL

SEQ ID NO: 155375 - protein, 9 aa, Homo Sapiens
SADPRPLAV

SEQ ID NO: 155376 - protein, 9 aa, Homo Sapiens
SADQAVAEL

SEQ ID NO: 155377 - protein, 9 aa, Homo Sapiens
SADQKTTLL

SEQ ID NO: 155378 - protein, 9 aa, Homo Sapiens
SADQSPSAL

SEQ ID NO: 155379 - protein, 9 aa, Homo Sapiens
SADQVTRAL

SEQ ID NO: 155380 - protein, 9 aa, Homo Sapiens
SADRFVTLL

SEQ ID NO: 155381 - protein, 9 aa, Homo Sapiens
SADSANDGF

SEQ ID NO: 155382 - protein, 9 aa, Homo Sapiens
SADSIGAVL

SEQ ID NO: 155383 - protein, 9 aa, Homo Sapiens
SADSKPIDV

SEQ ID NO: 155384 - protein, 9 aa, Homo Sapiens
SADSLEHVL

SEQ ID NO: 155385 - protein, 9 aa, Homo Sapiens
SADSPSPGL

SEQ ID NO: 155386 - protein, 9 aa, Homo Sapiens
SADSRIAEL

SEQ ID NO: 155387 - protein, 9 aa, Homo Sapiens
SADSRIVKM

SEQ ID NO: 155388 - protein, 9 aa, Homo Sapiens
SADTFTRNL

SEQ ID NO: 155389 - protein, 9 aa, Homo Sapiens
SADTPCATV

SEQ ID NO: 155390 - protein, 9 aa, Homo Sapiens
SADTPEASL

SEQ ID NO: 155391 - protein, 9 aa, Homo Sapiens
SADTTILFV

SEQ ID NO: 155392 - protein, 9 aa, Homo Sapiens
SADTVVIFD

SEQ ID NO: 155393 - protein, 9 aa, Homo Sapiens
SADVAAVVM

SEQ ID NO: 155394 - protein, 9 aa, Homo Sapiens
SADVATPKM

SEQ ID NO: 155395 - protein, 9 aa, Homo Sapiens
SADVDIHHL

SEQ ID NO: 155396 - protein, 9 aa, Homo Sapiens
SADVDIKEL

SEQ ID NO: 155397 - protein, 9 aa, Homo Sapiens
SADVKEVLL

SEQ ID NO: 155398 - protein, 9 aa, Homo Sapiens
SADVRCSVF

SEQ ID NO: 155399 - protein, 9 aa, Homo Sapiens
SADVSGLAV

SEQ ID NO: 155400 - protein, 9 aa, Homo Sapiens
SADWSLEAL

SEQ ID NO: 155401 - protein, 9 aa, Homo Sapiens
SADYSTPPH

SEQ ID NO: 155402 - protein, 9 aa, Homo Sapiens
SAEAEASRL

SEQ ID NO: 155403 - protein, 9 aa, Homo Sapiens
SAEAPSHHL

SEQ ID NO: 155404 - protein, 9 aa, Homo Sapiens
SAEAVTTTL

SEQ ID NO: 155405 - protein, 9 aa, Homo Sapiens
SAEEMVTLL

SEQ ID NO: 155406 - protein, 9 aa, Homo Sapiens
SAEEVAKEL

SEQ ID NO: 155407 - protein, 9 aa, Homo Sapiens
SAEHSHPAL

SEQ ID NO: 155408 - protein, 9 aa, Homo Sapiens
SAELASMEL

SEQ ID NO: 155409 - protein, 9 aa, Homo Sapiens
SAEPAGTPL

SEQ ID NO: 155410 - protein, 9 aa, Homo Sapiens
SAEQAKVVL

SEQ ID NO: 155411 - protein, 9 aa, Homo Sapiens
SAETPTIPL

SEQ ID NO: 155412 - protein, 9 aa, Homo Sapiens
SASPPGPTL

SEQ ID NO: 155413 - protein, 9 aa, Homo Sapiens
SATDPVTVL

SEQ ID NO: 155414 - protein, 9 aa, Homo Sapiens
SDSSSAPAF

SEQ ID NO: 155415 - protein, 9 aa, Homo Sapiens
SFDAVLEAL

SEQ ID NO: 155416 - protein, 9 aa, Homo Sapiens
SGDDNLTSL

SEQ ID NO: 155417 - protein, 9 aa, Homo Sapiens
SGDGGRAEL

SEQ ID NO: 155418 - protein, 9 aa, Homo Sapiens
SGDGVTHTV

SEQ ID NO: 155419 - protein, 9 aa, Homo Sapiens
SGDGVTHVI

SEQ ID NO: 155420 - protein, 9 aa, Homo Sapiens
SGDKVGSSL

SEQ ID NO: 155421 - protein, 9 aa, Homo Sapiens
SGDPSIQTL

SEQ ID NO: 155422 - protein, 9 aa, Homo Sapiens
SGDVDSLEL

SEQ ID NO: 155423 - protein, 9 aa, Homo Sapiens
SGLDLNTSL

SEQ ID NO: 155424 - protein, 9 aa, Homo Sapiens
SIDAEVREL

SEQ ID NO: 155425 - protein, 9 aa, Homo Sapiens
SIDAGSKEL

SEQ ID NO: 155426 - protein, 9 aa, Homo Sapiens
SIDDLPTVL

SEQ ID NO: 155427 - protein, 9 aa, Homo Sapiens
SIDDQLNTL

SEQ ID NO: 155428 - protein, 9 aa, Homo Sapiens
SIDDVDSKL

SEQ ID NO: 155429 - protein, 9 aa, Homo Sapiens
SIDFDQGEL

SEQ ID NO: 155430 - protein, 9 aa, Homo Sapiens
SIDFPLTKV

SEQ ID NO: 155431 - protein, 9 aa, Homo Sapiens
SIDICHQVL

SEQ ID NO: 155432 - protein, 9 aa, Homo Sapiens
SIDKAVTKL

SEQ ID NO: 155433 - protein, 9 aa, Homo Sapiens
SIDKTGENF

SEQ ID NO: 155434 - protein, 9 aa, Homo Sapiens
SIDQTGELL

SEQ ID NO: 155435 - protein, 9 aa, Homo Sapiens
SIDRNPPQL

SEQ ID NO: 155436 - protein, 9 aa, Homo Sapiens
SIDSAGIQL

SEQ ID NO: 155437 - protein, 9 aa, Homo Sapiens
SIDTHGETF

SEQ ID NO: 155438 - protein, 9 aa, Homo Sapiens
SIEDKVKAL

SEQ ID NO: 155439 - protein, 9 aa, Homo Sapiens
SIELPSMAV

SEQ ID NO: 155440 - protein, 9 aa, Homo Sapiens
SLDAVNLAL

SEQ ID NO: 155441 - protein, 9 aa, Homo Sapiens
SLDDSCSQL

SEQ ID NO: 155442 - protein, 9 aa, Homo Sapiens
SLDIPATYL

SEQ ID NO: 155443 - protein, 9 aa, Homo Sapiens
SLDKDIVAL

SEQ ID NO: 155444 - protein, 9 aa, Homo Sapiens
SLDLPHSEL

SEQ ID NO: 155445 - protein, 9 aa, Homo Sapiens
SLDNGGCAL

SEQ ID NO: 155446 - protein, 9 aa, Homo Sapiens
SLDQPGGTL

SEQ ID NO: 155447 - protein, 9 aa, Homo Sapiens
SLDQPTQTV

SEQ ID NO: 155448 - protein, 9 aa, Homo Sapiens
SLDQPVTAL

SEQ ID NO: 155449 - protein, 9 aa, Homo Sapiens
SLDRPFTNL

SEQ ID NO: 155450 - protein, 9 aa, Homo Sapiens
SLDSPSYVL

SEQ ID NO: 155451 - protein, 9 aa, Homo Sapiens
SLDSSGFSL

SEQ ID NO: 155452 - protein, 9 aa, Homo Sapiens
SLEPVAVEL

SEQ ID NO: 155453 - protein, 9 aa, Homo Sapiens
SMDDHKLSL

SEQ ID NO: 155454 - protein, 9 aa, Homo Sapiens
SMDEINKQL

SEQ ID NO: 155455 - protein, 9 aa, Homo Sapiens
SMDSSHVSL

SEQ ID NO: 155456 - protein, 9 aa, Homo Sapiens
SNDDAVRVL

SEQ ID NO: 155457 - protein, 9 aa, Homo Sapiens
SNDIVNAIM

SEQ ID NO: 155458 - protein, 9 aa, Homo Sapiens
SPSDPSSSL

SEQ ID NO: 155459 - protein, 9 aa, Homo Sapiens
SQDARFYAL

SEQ ID NO: 155460 - protein, 9 aa, Homo Sapiens
SQDDPLHPL

SEQ ID NO: 155461 - protein, 9 aa, Homo Sapiens
SQDFVESVL

SEQ ID NO: 155462 - protein, 9 aa, Homo Sapiens
SQDGPLSVL

SEQ ID NO: 155463 - protein, 9 aa, Homo Sapiens
SQDIVNQVL

SEQ ID NO: 155464 - protein, 9 aa, Homo Sapiens
SQDLAFLSM

SEQ ID NO: 155465 - protein, 9 aa, Homo Sapiens
SQDLGQHGL

SEQ ID NO: 155466 - protein, 9 aa, Homo Sapiens
SQDLKLSTI

SEQ ID NO: 155467 - protein, 9 aa, Homo Sapiens
SQDLLPLSL

SEQ ID NO: 155468 - protein, 9 aa, Homo Sapiens
SQDLTHLNL

SEQ ID NO: 155469 - protein, 9 aa, Homo Sapiens
SQDLVQVEV

SEQ ID NO: 155470 - protein, 9 aa, Homo Sapiens
SQDPGAVVL

SEQ ID NO: 155471 - protein, 9 aa, Homo Sapiens
SQDPGTHVV

SEQ ID NO: 155472 - protein, 9 aa, Homo Sapiens
SQDPNRVEL

SEQ ID NO: 155473 - protein, 9 aa, Homo Sapiens
SQDVNKQGL

SEQ ID NO: 155474 - protein, 9 aa, Homo Sapiens
SQDVTTVTL

SEQ ID NO: 155475 - protein, 9 aa, Homo Sapiens
SQDYPTLAF

SEQ ID NO: 155476 - protein, 9 aa, Homo Sapiens
SQDYVANEL

SEQ ID NO: 155477 - protein, 9 aa, Homo Sapiens
SSADINSSL

SEQ ID NO: 155478 - protein, 9 aa, Homo Sapiens
SSDAPGNVL

SEQ ID NO: 155479 - protein, 9 aa, Homo Sapiens
SSDDINKFL

SEQ ID NO: 155480 - protein, 9 aa, Homo Sapiens
SSDDYGKDL

SEQ ID NO: 155481 - protein, 9 aa, Homo Sapiens
SSDECVVAL

SEQ ID NO: 155482 - protein, 9 aa, Homo Sapiens
SSDEDILCL

SEQ ID NO: 155483 - protein, 9 aa, Homo Sapiens
SSDGHEFIV

SEQ ID NO: 155484 - protein, 9 aa, Homo Sapiens
SSDIQVKEL

SEQ ID NO: 155485 - protein, 9 aa, Homo Sapiens
SSDKPGLDL

SEQ ID NO: 155486 - protein, 9 aa, Homo Sapiens
SSDLFLISM

SEQ ID NO: 155487 - protein, 9 aa, Homo Sapiens
SSDLGLQAL

SEQ ID NO: 155488 - protein, 9 aa, Homo Sapiens
SSDLHLVTL

SEQ ID NO: 155489 - protein, 9 aa, Homo Sapiens
SSDLPGGEF

SEQ ID NO: 155490 - protein, 9 aa, Homo Sapiens
SSDLPVALL

SEQ ID NO: 155491 - protein, 9 aa, Homo Sapiens
SSDMSSREL

SEQ ID NO: 155492 - protein, 9 aa, Homo Sapiens
SSDNPNVLV

SEQ ID NO: 155493 - protein, 9 aa, Homo Sapiens
SSDNPQPEM

SEQ ID NO: 155494 - protein, 9 aa, Homo Sapiens
SSDPEVLTL

SEQ ID NO: 155495 - protein, 9 aa, Homo Sapiens
SSDPKVLTL

SEQ ID NO: 155496 - protein, 9 aa, Homo Sapiens
SSDPMLSEF

SEQ ID NO: 155497 - protein, 9 aa, Homo Sapiens
SSDPSLIGL

SEQ ID NO: 155498 - protein, 9 aa, Homo Sapiens
SSDRAIQSL

SEQ ID NO: 155499 - protein, 9 aa, Homo Sapiens
SSDSPTNHF

SEQ ID NO: 155500 - protein, 9 aa, Homo Sapiens
SSDSQILDL

SEQ ID NO: 155501 - protein, 9 aa, Homo Sapiens
SSDTSGLSF

SEQ ID NO: 155502 - protein, 9 aa, Homo Sapiens
SSDVQKNAL

SEQ ID NO: 155503 - protein, 9 aa, Homo Sapiens
SSDVRNSAL

SEQ ID NO: 155504 - protein, 9 aa, Homo Sapiens
SSDVTKASL

SEQ ID NO: 155505 - protein, 9 aa, Homo Sapiens
SSDVVVQVL

SEQ ID NO: 155506 - protein, 9 aa, Homo Sapiens
SSDVVYNAF

SEQ ID NO: 155507 - protein, 9 aa, Homo Sapiens
SSDWVTTDI

SEQ ID NO: 155508 - protein, 9 aa, Homo Sapiens
SSNLELHSL

SEQ ID NO: 155509 - protein, 9 aa, Homo Sapiens
SSPAPRTAL

SEQ ID NO: 155510 - protein, 9 aa, Homo Sapiens
STDEEVTSL

SEQ ID NO: 155511 - protein, 9 aa, Homo Sapiens
STDFPQMQL

SEQ ID NO: 155512 - protein, 9 aa, Homo Sapiens
STDFPSTSI

SEQ ID NO: 155513 - protein, 9 aa, Homo Sapiens
STDGAPAQL

SEQ ID NO: 155514 - protein, 9 aa, Homo Sapiens
STDGIGFAI

SEQ ID NO: 155515 - protein, 9 aa, Homo Sapiens
STDSFNNEL

SEQ ID NO: 155516 - protein, 9 aa, Homo Sapiens
STDTVEHSL

SEQ ID NO: 155517 - protein, 9 aa, Homo Sapiens
STDVCGTKL

SEQ ID NO: 155518 - protein, 9 aa, Homo Sapiens
STDYETHEF

SEQ ID NO: 155519 - protein, 9 aa, Homo Sapiens
SVDAHTAEV

SEQ ID NO: 155520 - protein, 9 aa, Homo Sapiens
SVDDAAIVI

SEQ ID NO: 155521 - protein, 9 aa, Homo Sapiens
SVDDFSSAL

SEQ ID NO: 155522 - protein, 9 aa, Homo Sapiens
SVDDTIVAL

SEQ ID NO: 155523 - protein, 9 aa, Homo Sapiens
SVDDYQHRL

SEQ ID NO: 155524 - protein, 9 aa, Homo Sapiens
SVDETTQAM

SEQ ID NO: 155525 - protein, 9 aa, Homo Sapiens
SVDEVARQL

SEQ ID NO: 155526 - protein, 9 aa, Homo Sapiens
SVDEVEISV

SEQ ID NO: 155527 - protein, 9 aa, Homo Sapiens
SVDGDTRMV

SEQ ID NO: 155528 - protein, 9 aa, Homo Sapiens
SVDGSPLLL

SEQ ID NO: 155529 - protein, 9 aa, Homo Sapiens
SVDIGSLAI

SEQ ID NO: 155530 - protein, 9 aa, Homo Sapiens
SVDISGLQL

SEQ ID NO: 155531 - protein, 9 aa, Homo Sapiens
SVDKPGIVV

SEQ ID NO: 155532 - protein, 9 aa, Homo Sapiens
SVDLRGAAL

SEQ ID NO: 155533 - protein, 9 aa, Homo Sapiens
SVDPAGVTM

SEQ ID NO: 155534 - protein, 9 aa, Homo Sapiens
SVDSELTSL

SEQ ID NO: 155535 - protein, 9 aa, Homo Sapiens
SVDSHFCHL

SEQ ID NO: 155536 - protein, 9 aa, Homo Sapiens
SVDSHFSHL

SEQ ID NO: 155537 - protein, 9 aa, Homo Sapiens
SVDSKPPVI

SEQ ID NO: 155538 - protein, 9 aa, Homo Sapiens
SVDTRCSSL

SEQ ID NO: 155539 - protein, 9 aa, Homo Sapiens
SVDVTNTTF

SEQ ID NO: 155540 - protein, 9 aa, Homo Sapiens
SVDWPESFV

SEQ ID NO: 155541 - protein, 9 aa, Homo Sapiens
SVDWPESSL

SEQ ID NO: 155542 - protein, 9 aa, Homo Sapiens
SWDEAVQAL

SEQ ID NO: 155543 - protein, 9 aa, Homo Sapiens
TAASPTIAL

SEQ ID NO: 155544 - protein, 9 aa, Homo Sapiens
TAAVWAVKI

SEQ ID NO: 155545 - protein, 9 aa, Homo Sapiens
TADAMNREV

SEQ ID NO: 155546 - protein, 9 aa, Homo Sapiens
TADCPGHGL

SEQ ID NO: 155547 - protein, 9 aa, Homo Sapiens
TADDFLVFL

SEQ ID NO: 155548 - protein, 9 aa, Homo Sapiens
TADDPSLSL

SEQ ID NO: 155549 - protein, 9 aa, Homo Sapiens
TADEIQNTL

SEQ ID NO: 155550 - protein, 9 aa, Homo Sapiens
TADEVHYFL

SEQ ID NO: 155551 - protein, 9 aa, Homo Sapiens
TADFPPSKL

SEQ ID NO: 155552 - protein, 9 aa, Homo Sapiens
TADFVNYYF

SEQ ID NO: 155553 - protein, 9 aa, Homo Sapiens
TADGAHFEL

SEQ ID NO: 155554 - protein, 9 aa, Homo Sapiens
TADGDLYTL

SEQ ID NO: 155555 - protein, 9 aa, Homo Sapiens
TADGICSMM

SEQ ID NO: 155556 - protein, 9 aa, Homo Sapiens
TADGIVSHL

SEQ ID NO: 155557 - protein, 9 aa, Homo Sapiens
TADGRVVKL

SEQ ID NO: 155558 - protein, 9 aa, Homo Sapiens
TADGVAVIP

SEQ ID NO: 155559 - protein, 9 aa, Homo Sapiens
TADIAIVAL

SEQ ID NO: 155560 - protein, 9 aa, Homo Sapiens
TADIPALFL

SEQ ID NO: 155561 - protein, 9 aa, Homo Sapiens
TADISDVWL

SEQ ID NO: 155562 - protein, 9 aa, Homo Sapiens
TADIVINLL

SEQ ID NO: 155563 - protein, 9 aa, Homo Sapiens
TADKLQEFL

SEQ ID NO: 155564 - protein, 9 aa, Homo Sapiens
TADLDITEI

SEQ ID NO: 155565 - protein, 9 aa, Homo Sapiens
TADLFLTTL

SEQ ID NO: 155566 - protein, 9 aa, Homo Sapiens
TADLPKQSI

SEQ ID NO: 155567 - protein, 9 aa, Homo Sapiens
TADLPNELI

SEQ ID NO: 155568 - protein, 9 aa, Homo Sapiens
TADNISHGL

SEQ ID NO: 155569 - protein, 9 aa, Homo Sapiens
TADNLVLNL

SEQ ID NO: 155570 - protein, 9 aa, Homo Sapiens
TADRIPIAV

SEQ ID NO: 155571 - protein, 9 aa, Homo Sapiens
TADSQPPVF

SEQ ID NO: 155572 - protein, 9 aa, Homo Sapiens
TADTILNTL

SEQ ID NO: 155573 - protein, 9 aa, Homo Sapiens
TADTSKVSL

SEQ ID NO: 155574 - protein, 9 aa, Homo Sapiens
TADVIVNSV

SEQ ID NO: 155575 - protein, 9 aa, Homo Sapiens
TADVKASVL

SEQ ID NO: 155576 - protein, 9 aa, Homo Sapiens
TADVSHTNL

SEQ ID NO: 155577 - protein, 9 aa, Homo Sapiens
TADVTSAVM

SEQ ID NO: 155578 - protein, 9 aa, Homo Sapiens
TAEAIQTPL

SEQ ID NO: 155579 - protein, 9 aa, Homo Sapiens
TAEERVAEL

SEQ ID NO: 155580 - protein, 9 aa, Homo Sapiens
TAEHPGTRL

SEQ ID NO: 155581 - protein, 9 aa, Homo Sapiens
TAESRVSVL

SEQ ID NO: 155582 - protein, 9 aa, Homo Sapiens
TAETPSRPL

SEQ ID NO: 155583 - protein, 9 aa, Homo Sapiens
TAIDDRCEL

SEQ ID NO: 155584 - protein, 9 aa, Homo Sapiens
TASEPSAQL

SEQ ID NO: 155585 - protein, 9 aa, Homo Sapiens
TGDTPGLEV

SEQ ID NO: 155586 - protein, 9 aa, Homo Sapiens
TGDVMSLSL

SEQ ID NO: 155587 - protein, 9 aa, Homo Sapiens
TGDVPHTSV

SEQ ID NO: 155588 - protein, 9 aa, Homo Sapiens
TGTVEFKEF

SEQ ID NO: 155589 - protein, 9 aa, Homo Sapiens
TIDADAPEL

SEQ ID NO: 155590 - protein, 9 aa, Homo Sapiens
TIDADQRVL

SEQ ID NO: 155591 - protein, 9 aa, Homo Sapiens
TIDATGNSV

SEQ ID NO: 155592 - protein, 9 aa, Homo Sapiens
TIDDGIFEV

SEQ ID NO: 155593 - protein, 9 aa, Homo Sapiens
TIDESGSIL

SEQ ID NO: 155594 - protein, 9 aa, Homo Sapiens
TIDESLSEL

SEQ ID NO: 155595 - protein, 9 aa, Homo Sapiens
TIDPNTRTL

SEQ ID NO: 155596 - protein, 9 aa, Homo Sapiens
TIDQGMAAL

SEQ ID NO: 155597 - protein, 9 aa, Homo Sapiens
TIDSSGPSL

SEQ ID NO: 155598 - protein, 9 aa, Homo Sapiens
TIDTENSTV

SEQ ID NO: 155599 - protein, 9 aa, Homo Sapiens
TIDTSRVSL

SEQ ID NO: 155600 - protein, 9 aa, Homo Sapiens
TIEDAIAVL

SEQ ID NO: 155601 - protein, 9 aa, Homo Sapiens
TKDYGNSPL

SEQ ID NO: 155602 - protein, 9 aa, Homo Sapiens
TLDFENEKL

SEQ ID NO: 155603 - protein, 9 aa, Homo Sapiens
TLDLPTAPL

SEQ ID NO: 155604 - protein, 9 aa, Homo Sapiens
TLDLQNNDL

SEQ ID NO: 155605 - protein, 9 aa, Homo Sapiens
TLDLSHNSI

SEQ ID NO: 155606 - protein, 9 aa, Homo Sapiens
TLDQENQQL

SEQ ID NO: 155607 - protein, 9 aa, Homo Sapiens
TLDQTLNEL

SEQ ID NO: 155608 - protein, 9 aa, Homo Sapiens
TLQHIVTLL

SEQ ID NO: 155609 - protein, 9 aa, Homo Sapiens
TMDDLTTAL

SEQ ID NO: 155610 - protein, 9 aa, Homo Sapiens
TMDGANVEM

SEQ ID NO: 155611 - protein, 9 aa, Homo Sapiens
TMDIGRTVL

SEQ ID NO: 155612 - protein, 9 aa, Homo Sapiens
TQDAVPLTL

SEQ ID NO: 155613 - protein, 9 aa, Homo Sapiens
TQDELDQTL

SEQ ID NO: 155614 - protein, 9 aa, Homo Sapiens
TQDELKEVF

SEQ ID NO: 155615 - protein, 9 aa, Homo Sapiens
TQDEVSQTL

SEQ ID NO: 155616 - protein, 9 aa, Homo Sapiens
TQDLPGVKL

SEQ ID NO: 155617 - protein, 9 aa, Homo Sapiens
TQDLQAKEL

SEQ ID NO: 155618 - protein, 9 aa, Homo Sapiens
TQDLTVSQL

SEQ ID NO: 155619 - protein, 9 aa, Homo Sapiens
TQDSSILPL

SEQ ID NO: 155620 - protein, 9 aa, Homo Sapiens
TSDDVAKEF

SEQ ID NO: 155621 - protein, 9 aa, Homo Sapiens
TSDEQNHLV

SEQ ID NO: 155622 - protein, 9 aa, Homo Sapiens
TSDGSPSPL

SEQ ID NO: 155623 - protein, 9 aa, Homo Sapiens
TSDIILVGL

SEQ ID NO: 155624 - protein, 9 aa, Homo Sapiens
TSDIYFVSL

SEQ ID NO: 155625 - protein, 9 aa, Homo Sapiens
TSDKGFVTM

SEQ ID NO: 155626 - protein, 9 aa, Homo Sapiens
TSDKPHSAL

SEQ ID NO: 155627 - protein, 9 aa, Homo Sapiens
TSDLGKTEL

SEQ ID NO: 155628 - protein, 9 aa, Homo Sapiens
TSDLIVLGL

SEQ ID NO: 155629 - protein, 9 aa, Homo Sapiens
TSDLPSFEV

SEQ ID NO: 155630 - protein, 9 aa, Homo Sapiens
TSDMGSYAL

SEQ ID NO: 155631 - protein, 9 aa, Homo Sapiens
TSDNPVVQL

SEQ ID NO: 155632 - protein, 9 aa, Homo Sapiens
TSDPAAHAL

SEQ ID NO: 155633 - protein, 9 aa, Homo Sapiens
TSDPALCTL

SEQ ID NO: 155634 - protein, 9 aa, Homo Sapiens
TSDPALLSF

SEQ ID NO: 155635 - protein, 9 aa, Homo Sapiens
TSDPALNHV

SEQ ID NO: 155636 - protein, 9 aa, Homo Sapiens
TSDPAVQAI

SEQ ID NO: 155637 - protein, 9 aa, Homo Sapiens
TSDPIGEVL

SEQ ID NO: 155638 - protein, 9 aa, Homo Sapiens
TSDVGATLL

SEQ ID NO: 155639 - protein, 9 aa, Homo Sapiens
TSDVSQATL

SEQ ID NO: 155640 - protein, 9 aa, Homo Sapiens
TSSSPGSPI

SEQ ID NO: 155641 - protein, 9 aa, Homo Sapiens
TTDDKAVVL

SEQ ID NO: 155642 - protein, 9 aa, Homo Sapiens
TTDDSICVL

SEQ ID NO: 155643 - protein, 9 aa, Homo Sapiens
TTDEPGLPF

SEQ ID NO: 155644 - protein, 9 aa, Homo Sapiens
TTDPGASSL

SEQ ID NO: 155645 - protein, 9 aa, Homo Sapiens
TTDSPTTKV

SEQ ID NO: 155646 - protein, 9 aa, Homo Sapiens
TVDAPNFIV

SEQ ID NO: 155647 - protein, 9 aa, Homo Sapiens
TVDDLVAEI

SEQ ID NO: 155648 - protein, 9 aa, Homo Sapiens
TVDDPYATF

SEQ ID NO: 155649 - protein, 9 aa, Homo Sapiens
TVDGKTANI

SEQ ID NO: 155650 - protein, 9 aa, Homo Sapiens
TVDGPRNEL

SEQ ID NO: 155651 - protein, 9 aa, Homo Sapiens
TVDGPSGKL

SEQ ID NO: 155652 - protein, 9 aa, Homo Sapiens
TVDGSPHEL

SEQ ID NO: 155653 - protein, 9 aa, Homo Sapiens
TVDTPHGIF

SEQ ID NO: 155654 - protein, 9 aa, Homo Sapiens
TWDELGEAL

SEQ ID NO: 155655 - protein, 9 aa, Homo Sapiens
TWDERFSAL

SEQ ID NO: 155656 - protein, 9 aa, Homo Sapiens
TYDLIKDAL

SEQ ID NO: 155657 - protein, 9 aa, Homo Sapiens
VAAARAVPV

SEQ ID NO: 155658 - protein, 9 aa, Homo Sapiens
VADAIRTSL

SEQ ID NO: 155659 - protein, 9 aa, Homo Sapiens
VADAVTYQL

SEQ ID NO: 155660 - protein, 9 aa, Homo Sapiens
VADAWGVEL

SEQ ID NO: 155661 - protein, 9 aa, Homo Sapiens
VADDPIVMV

SEQ ID NO: 155662 - protein, 9 aa, Homo Sapiens
VADDPNDPY

SEQ ID NO: 155663 - protein, 9 aa, Homo Sapiens
VADDQKLMI

SEQ ID NO: 155664 - protein, 9 aa, Homo Sapiens
VADDTPVLL

SEQ ID NO: 155665 - protein, 9 aa, Homo Sapiens
VADDYIHTA

SEQ ID NO: 155666 - protein, 9 aa, Homo Sapiens
VADEAGQRL

SEQ ID NO: 155667 - protein, 9 aa, Homo Sapiens
VADEDAHNI

SEQ ID NO: 155668 - protein, 9 aa, Homo Sapiens
VADEEIAAL

SEQ ID NO: 155669 - protein, 9 aa, Homo Sapiens
VADEELVHL

SEQ ID NO: 155670 - protein, 9 aa, Homo Sapiens
VADEGICYL

SEQ ID NO: 155671 - protein, 9 aa, Homo Sapiens
VADEISFRL

SEQ ID NO: 155672 - protein, 9 aa, Homo Sapiens
VADELLENL

SEQ ID NO: 155673 - protein, 9 aa, Homo Sapiens
VADELVAEF

SEQ ID NO: 155674 - protein, 9 aa, Homo Sapiens
VADELVSEF

SEQ ID NO: 155675 - protein, 9 aa, Homo Sapiens
VADEMDVML

SEQ ID NO: 155676 - protein, 9 aa, Homo Sapiens
VADENLKAF

SEQ ID NO: 155677 - protein, 9 aa, Homo Sapiens
VADEQNRAL

SEQ ID NO: 155678 - protein, 9 aa, Homo Sapiens
VADEQQRLM

SEQ ID NO: 155679 - protein, 9 aa, Homo Sapiens
VADEYIERL

SEQ ID NO: 155680 - protein, 9 aa, Homo Sapiens
VADFGLARL

SEQ ID NO: 155681 - protein, 9 aa, Homo Sapiens
VADFGLITM

SEQ ID NO: 155682 - protein, 9 aa, Homo Sapiens
VADFGLSRL

SEQ ID NO: 155683 - protein, 9 aa, Homo Sapiens
VADFGSATF

SEQ ID NO: 155684 - protein, 9 aa, Homo Sapiens
VADFLQNIL

SEQ ID NO: 155685 - protein, 9 aa, Homo Sapiens
VADFQRYIL

SEQ ID NO: 155686 - protein, 9 aa, Homo Sapiens
VADFSATYL

SEQ ID NO: 155687 - protein, 9 aa, Homo Sapiens
VADFVRDSL

SEQ ID NO: 155688 - protein, 9 aa, Homo Sapiens
VADGLITTL

SEQ ID NO: 155689 - protein, 9 aa, Homo Sapiens
VADGLPLAA

SEQ ID NO: 155690 - protein, 9 aa, Homo Sapiens
VADGLVTTL

SEQ ID NO: 155691 - protein, 9 aa, Homo Sapiens
VADGYPVRL

SEQ ID NO: 155692 - protein, 9 aa, Homo Sapiens
VADHPFLFL

SEQ ID NO: 155693 - protein, 9 aa, Homo Sapiens
VADHPGIDF

SEQ ID NO: 155694 - protein, 9 aa, Homo Sapiens
VADIAVELL

SEQ ID NO: 155695 - protein, 9 aa, Homo Sapiens
VADIDGSTF

SEQ ID NO: 155696 - protein, 9 aa, Homo Sapiens
VADIKASQI

SEQ ID NO: 155697 - protein, 9 aa, Homo Sapiens
VADILAHEI

SEQ ID NO: 155698 - protein, 9 aa, Homo Sapiens
VADKDLLDL

SEQ ID NO: 155699 - protein, 9 aa, Homo Sapiens
VADKDTVLL

SEQ ID NO: 155700 - protein, 9 aa, Homo Sapiens
VADLAESIM

SEQ ID NO: 155701 - protein, 9 aa, Homo Sapiens
VADLAFAHL

SEQ ID NO: 155702 - protein, 9 aa, Homo Sapiens
VADLGAMVV

SEQ ID NO: 155703 - protein, 9 aa, Homo Sapiens
VADLIESML

SEQ ID NO: 155704 - protein, 9 aa, Homo Sapiens
VADLIGLNL

SEQ ID NO: 155705 - protein, 9 aa, Homo Sapiens
VADLQLIDF

SEQ ID NO: 155706 - protein, 9 aa, Homo Sapiens
VADLQSINI

SEQ ID NO: 155707 - protein, 9 aa, Homo Sapiens
VADLREAIL

SEQ ID NO: 155708 - protein, 9 aa, Homo Sapiens
VADLSEQSL

SEQ ID NO: 155709 - protein, 9 aa, Homo Sapiens
VADLTGELM

SEQ ID NO: 155710 - protein, 9 aa, Homo Sapiens
VADLVVNIL

SEQ ID NO: 155711 - protein, 9 aa, Homo Sapiens
VADMAAYQL

SEQ ID NO: 155712 - protein, 9 aa, Homo Sapiens
VADMVKQFF

SEQ ID NO: 155713 - protein, 9 aa, Homo Sapiens
VADNLAIQL

SEQ ID NO: 155714 - protein, 9 aa, Homo Sapiens
VADNRIQEL

SEQ ID NO: 155715 - protein, 9 aa, Homo Sapiens
VADPETRTV

SEQ ID NO: 155716 - protein, 9 aa, Homo Sapiens
VADPGVTVA

SEQ ID NO: 155717 - protein, 9 aa, Homo Sapiens
VADPIIYVL

SEQ ID NO: 155718 - protein, 9 aa, Homo Sapiens
VADPPIARL

SEQ ID NO: 155719 - protein, 9 aa, Homo Sapiens
VADPVEAVL

SEQ ID NO: 155720 - protein, 9 aa, Homo Sapiens
VADPYVVIM

SEQ ID NO: 155721 - protein, 9 aa, Homo Sapiens
VADQIVTKL

SEQ ID NO: 155722 - protein, 9 aa, Homo Sapiens
VADRLGLEL

SEQ ID NO: 155723 - protein, 9 aa, Homo Sapiens
VADRLLVEL

SEQ ID NO: 155724 - protein, 9 aa, Homo Sapiens
VADRLMLEL

SEQ ID NO: 155725 - protein, 9 aa, Homo Sapiens
VADSHSSHF

SEQ ID NO: 155726 - protein, 9 aa, Homo Sapiens
VADSKTLLE

SEQ ID NO: 155727 - protein, 9 aa, Homo Sapiens
VADSTPAHF

SEQ ID NO: 155728 - protein, 9 aa, Homo Sapiens
VADSVEKGL

SEQ ID NO: 155729 - protein, 9 aa, Homo Sapiens
VADTDQKAL

SEQ ID NO: 155730 - protein, 9 aa, Homo Sapiens
VADTFQDYF

SEQ ID NO: 155731 - protein, 9 aa, Homo Sapiens
VADTGLQIL

SEQ ID NO: 155732 - protein, 9 aa, Homo Sapiens
VADTVARVL

SEQ ID NO: 155733 - protein, 9 aa, Homo Sapiens
VADTVYRAL

SEQ ID NO: 155734 - protein, 9 aa, Homo Sapiens
VADWVYNEL

SEQ ID NO: 155735 - protein, 9 aa, Homo Sapiens
VADYEATTF

SEQ ID NO: 155736 - protein, 9 aa, Homo Sapiens
VAEAPGGEL

SEQ ID NO: 155737 - protein, 9 aa, Homo Sapiens
VAEEAKQAL

SEQ ID NO: 155738 - protein, 9 aa, Homo Sapiens
VAEENTRVL

SEQ ID NO: 155739 - protein, 9 aa, Homo Sapiens
VAEERGAVL

SEQ ID NO: 155740 - protein, 9 aa, Homo Sapiens
VAEEVNAIL

SEQ ID NO: 155741 - protein, 9 aa, Homo Sapiens
VAEGPGAEL

SEQ ID NO: 155742 - protein, 9 aa, Homo Sapiens
VAEHHVATL

SEQ ID NO: 155743 - protein, 9 aa, Homo Sapiens
VAEISSNSL

SEQ ID NO: 155744 - protein, 9 aa, Homo Sapiens
VAEITNACF

SEQ ID NO: 155745 - protein, 9 aa, Homo Sapiens
VAEKHGLTL

SEQ ID NO: 155746 - protein, 9 aa, Homo Sapiens
VAELPTPEL

SEQ ID NO: 155747 - protein, 9 aa, Homo Sapiens
VAELSSPDL

SEQ ID NO: 155748 - protein, 9 aa, Homo Sapiens
VAEPMHGSL

SEQ ID NO: 155749 - protein, 9 aa, Homo Sapiens
VAEQPPLKL

SEQ ID NO: 155750 - protein, 9 aa, Homo Sapiens
VAEQYSEKL

SEQ ID NO: 155751 - protein, 9 aa, Homo Sapiens
VAESAVSKL

SEQ ID NO: 155752 - protein, 9 aa, Homo Sapiens
VAESGLPAL

SEQ ID NO: 155753 - protein, 9 aa, Homo Sapiens
VAETHIVLL

SEQ ID NO: 155754 - protein, 9 aa, Homo Sapiens
VASEVSTSL

SEQ ID NO: 155755 - protein, 9 aa, Homo Sapiens
VATEGSREL

SEQ ID NO: 155756 - protein, 9 aa, Homo Sapiens
VAVEPGAAV

SEQ ID NO: 155757 - protein, 9 aa, Homo Sapiens
VDEASKKEI

SEQ ID NO: 155758 - protein, 9 aa, Homo Sapiens
VFDARELEL

SEQ ID NO: 155759 - protein, 9 aa, Homo Sapiens
VFDVSHNAV

SEQ ID NO: 155760 - protein, 9 aa, Homo Sapiens
VFDYSINSV

SEQ ID NO: 155761 - protein, 9 aa, Homo Sapiens
VGDEAFREL

SEQ ID NO: 155762 - protein, 9 aa, Homo Sapiens
VGDGIGMDL

SEQ ID NO: 155763 - protein, 9 aa, Homo Sapiens
VGDIPGVRF

SEQ ID NO: 155764 - protein, 9 aa, Homo Sapiens
VGDLLEVSL

SEQ ID NO: 155765 - protein, 9 aa, Homo Sapiens
VGDPAGNEL

SEQ ID NO: 155766 - protein, 9 aa, Homo Sapiens
VGDPGQRTL

SEQ ID NO: 155767 - protein, 9 aa, Homo Sapiens
VGDPHTVTV

SEQ ID NO: 155768 - protein, 9 aa, Homo Sapiens
VGDPSTTNL

SEQ ID NO: 155769 - protein, 9 aa, Homo Sapiens
VGDTQVVVF

SEQ ID NO: 155770 - protein, 9 aa, Homo Sapiens
VGDVPILQL

SEQ ID NO: 155771 - protein, 9 aa, Homo Sapiens
VIDAVTHAL

SEQ ID NO: 155772 - protein, 9 aa, Homo Sapiens
VIDDDVEEI

SEQ ID NO: 155773 - protein, 9 aa, Homo Sapiens
VIDDLVYSI

SEQ ID NO: 155774 - protein, 9 aa, Homo Sapiens
VIDDRAARL

SEQ ID NO: 155775 - protein, 9 aa, Homo Sapiens
VIDFTGHAL

SEQ ID NO: 155776 - protein, 9 aa, Homo Sapiens
VIDGEFKEL

SEQ ID NO: 155777 - protein, 9 aa, Homo Sapiens
VIDGNVMAI

SEQ ID NO: 155778 - protein, 9 aa, Homo Sapiens
VIDGSNVAM

SEQ ID NO: 155779 - protein, 9 aa, Homo Sapiens
VIDHHNYDI

SEQ ID NO: 155780 - protein, 9 aa, Homo Sapiens
VIDLETTSL

SEQ ID NO: 155781 - protein, 9 aa, Homo Sapiens
VIDNFTSQL

SEQ ID NO: 155782 - protein, 9 aa, Homo Sapiens
VIDPVPAAV

SEQ ID NO: 155783 - protein, 9 aa, Homo Sapiens
VIDQIAETL

SEQ ID NO: 155784 - protein, 9 aa, Homo Sapiens
VIDTPVFEL

SEQ ID NO: 155785 - protein, 9 aa, Homo Sapiens
VIEEQVAAL

SEQ ID NO: 155786 - protein, 9 aa, Homo Sapiens
VISDKDLEL

SEQ ID NO: 155787 - protein, 9 aa, Homo Sapiens
VISLEGKPL

SEQ ID NO: 155788 - protein, 9 aa, Homo Sapiens
VISQQSLEL

SEQ ID NO: 155789 - protein, 9 aa, Homo Sapiens
VKDVPNSQL

SEQ ID NO: 155790 - protein, 9 aa, Homo Sapiens
VLACNFSVI

SEQ ID NO: 155791 - protein, 9 aa, Homo Sapiens
VLDDSTAKL

SEQ ID NO: 155792 - protein, 9 aa, Homo Sapiens
VLDEADEML

SEQ ID NO: 155793 - protein, 9 aa, Homo Sapiens
VLDEAGSTV

SEQ ID NO: 155794 - protein, 9 aa, Homo Sapiens
VLDEFYSSL

SEQ ID NO: 155795 - protein, 9 aa, Homo Sapiens
VLDEIGIEI

SEQ ID NO: 155796 - protein, 9 aa, Homo Sapiens
VLDELGLSL

SEQ ID NO: 155797 - protein, 9 aa, Homo Sapiens
VLDEPGQDL

SEQ ID NO: 155798 - protein, 9 aa, Homo Sapiens
VLDEVVTVL

SEQ ID NO: 155799 - protein, 9 aa, Homo Sapiens
VLDFDPMAV

SEQ ID NO: 155800 - protein, 9 aa, Homo Sapiens
VLDGSGHIL

SEQ ID NO: 155801 - protein, 9 aa, Homo Sapiens
VLDLQEVTL

SEQ ID NO: 155802 - protein, 9 aa, Homo Sapiens
VLDLQHNAL

SEQ ID NO: 155803 - protein, 9 aa, Homo Sapiens
VLDLTYNNL

SEQ ID NO: 155804 - protein, 9 aa, Homo Sapiens
VLDNPTPEM

SEQ ID NO: 155805 - protein, 9 aa, Homo Sapiens
VLDSDSGLL

SEQ ID NO: 155806 - protein, 9 aa, Homo Sapiens
VLDSEGSFL

SEQ ID NO: 155807 - protein, 9 aa, Homo Sapiens
VLDVQRYPL

SEQ ID NO: 155808 - protein, 9 aa, Homo Sapiens
VLDVVERSL

SEQ ID NO: 155809 - protein, 9 aa, Homo Sapiens
VMDEIHTVL

SEQ ID NO: 155810 - protein, 9 aa, Homo Sapiens
VMDLSIVRL

SEQ ID NO: 155811 - protein, 9 aa, Homo Sapiens
VNDQPSGNL

SEQ ID NO: 155812 - protein, 9 aa, Homo Sapiens
VQDELHSVL

SEQ ID NO: 155813 - protein, 9 aa, Homo Sapiens
VQDESHSEW

SEQ ID NO: 155814 - protein, 9 aa, Homo Sapiens
VQDGATHSL

SEQ ID NO: 155815 - protein, 9 aa, Homo Sapiens
VQDILRTEL

SEQ ID NO: 155816 - protein, 9 aa, Homo Sapiens
VQDKGNAAL

SEQ ID NO: 155817 - protein, 9 aa, Homo Sapiens
VQDLIEGHL

SEQ ID NO: 155818 - protein, 9 aa, Homo Sapiens
VQDLKCLVF

SEQ ID NO: 155819 - protein, 9 aa, Homo Sapiens
VQDLLLLDV

SEQ ID NO: 155820 - protein, 9 aa, Homo Sapiens
VQDLMETDL

SEQ ID NO: 155821 - protein, 9 aa, Homo Sapiens
VQDRPESSL

SEQ ID NO: 155822 - protein, 9 aa, Homo Sapiens
VSDCQRIEL

SEQ ID NO: 155823 - protein, 9 aa, Homo Sapiens
VSDDGTLHM

SEQ ID NO: 155824 - protein, 9 aa, Homo Sapiens
VSDDPRCRL

SEQ ID NO: 155825 - protein, 9 aa, Homo Sapiens
VSDDTVMHL

SEQ ID NO: 155826 - protein, 9 aa, Homo Sapiens
VSDEDFSAL

SEQ ID NO: 155827 - protein, 9 aa, Homo Sapiens
VSDEEMMEL

SEQ ID NO: 155828 - protein, 9 aa, Homo Sapiens
VSDEMVVEL

SEQ ID NO: 155829 - protein, 9 aa, Homo Sapiens
VSDEQVLVL

SEQ ID NO: 155830 - protein, 9 aa, Homo Sapiens
VSDESSQYL

SEQ ID NO: 155831 - protein, 9 aa, Homo Sapiens
VSDEVGFGL

SEQ ID NO: 155832 - protein, 9 aa, Homo Sapiens
VSDFETKSL

SEQ ID NO: 155833 - protein, 9 aa, Homo Sapiens
VSDFGGRSL

SEQ ID NO: 155834 - protein, 9 aa, Homo Sapiens
VSDFGQSHL

SEQ ID NO: 155835 - protein, 9 aa, Homo Sapiens
VSDGVPLVL

SEQ ID NO: 155836 - protein, 9 aa, Homo Sapiens
VSDHFPVEF

SEQ ID NO: 155837 - protein, 9 aa, Homo Sapiens
VSDIGSQEL

SEQ ID NO: 155838 - protein, 9 aa, Homo Sapiens
VSDLGPVVL

SEQ ID NO: 155839 - protein, 9 aa, Homo Sapiens
VSDLNATEI

SEQ ID NO: 155840 - protein, 9 aa, Homo Sapiens
VSDLQHVTL

SEQ ID NO: 155841 - protein, 9 aa, Homo Sapiens
VSDLSQVTV

SEQ ID NO: 155842 - protein, 9 aa, Homo Sapiens
VSDPEEMEL

SEQ ID NO: 155843 - protein, 9 aa, Homo Sapiens
VSDPGVGSI

SEQ ID NO: 155844 - protein, 9 aa, Homo Sapiens
VSDPNLIHV

SEQ ID NO: 155845 - protein, 9 aa, Homo Sapiens
VSDPVTVHF

SEQ ID NO: 155846 - protein, 9 aa, Homo Sapiens
VSDQANHVL

SEQ ID NO: 155847 - protein, 9 aa, Homo Sapiens
VSDRKNIDL

SEQ ID NO: 155848 - protein, 9 aa, Homo Sapiens
VSDSALQEL

SEQ ID NO: 155849 - protein, 9 aa, Homo Sapiens
VSDSGAHVL

SEQ ID NO: 155850 - protein, 9 aa, Homo Sapiens
VSDSGVIAL

SEQ ID NO: 155851 - protein, 9 aa, Homo Sapiens
VSDSVTPVL

SEQ ID NO: 155852 - protein, 9 aa, Homo Sapiens
VSDTPSITA

SEQ ID NO: 155853 - protein, 9 aa, Homo Sapiens
VSDVLGVAV

SEQ ID NO: 155854 - protein, 9 aa, Homo Sapiens
VSDVPSLSV

SEQ ID NO: 155855 - protein, 9 aa, Homo Sapiens
VSDVVKVDL

SEQ ID NO: 155856 - protein, 9 aa, Homo Sapiens
VSDYTPLSL

SEQ ID NO: 155857 - protein, 9 aa, Homo Sapiens
VSELITKAV

SEQ ID NO: 155858 - protein, 9 aa, Homo Sapiens
VTDAAFNFL

SEQ ID NO: 155859 - protein, 9 aa, Homo Sapiens
VTDADRSIL

SEQ ID NO: 155860 - protein, 9 aa, Homo Sapiens
VTDDPTQVH

SEQ ID NO: 155861 - protein, 9 aa, Homo Sapiens
VTDENGNRL

SEQ ID NO: 155862 - protein, 9 aa, Homo Sapiens
VTDGALVVV

SEQ ID NO: 155863 - protein, 9 aa, Homo Sapiens
VTDHATTAL

SEQ ID NO: 155864 - protein, 9 aa, Homo Sapiens
VTDHNLHEL

SEQ ID NO: 155865 - protein, 9 aa, Homo Sapiens
VTDKSGISM

SEQ ID NO: 155866 - protein, 9 aa, Homo Sapiens
VTDLGTAEL

SEQ ID NO: 155867 - protein, 9 aa, Homo Sapiens
VTDLNSLEL

SEQ ID NO: 155868 - protein, 9 aa, Homo Sapiens
VTDSGRTVI

SEQ ID NO: 155869 - protein, 9 aa, Homo Sapiens
VTDTDILAL

SEQ ID NO: 155870 - protein, 9 aa, Homo Sapiens
VTDTGALYL

SEQ ID NO: 155871 - protein, 9 aa, Homo Sapiens
VTDTGCEIL

SEQ ID NO: 155872 - protein, 9 aa, Homo Sapiens
VTDVTSNLL

SEQ ID NO: 155873 - protein, 9 aa, Homo Sapiens
VTENPGKSI

SEQ ID NO: 155874 - protein, 9 aa, Homo Sapiens
VTEPDHPVL

SEQ ID NO: 155875 - protein, 9 aa, Homo Sapiens
VVDAGKVTL

SEQ ID NO: 155876 - protein, 9 aa, Homo Sapiens
VVDAPPLDL

SEQ ID NO: 155877 - protein, 9 aa, Homo Sapiens
VVDDIVSKL

SEQ ID NO: 155878 - protein, 9 aa, Homo Sapiens
VVDEKISAM

SEQ ID NO: 155879 - protein, 9 aa, Homo Sapiens
VVDETGNVL

SEQ ID NO: 155880 - protein, 9 aa, Homo Sapiens
VVDFVAATL

SEQ ID NO: 155881 - protein, 9 aa, Homo Sapiens
VVDGAFSYL

SEQ ID NO: 155882 - protein, 9 aa, Homo Sapiens
VVDGGAIPA

SEQ ID NO: 155883 - protein, 9 aa, Homo Sapiens
VVDGTPLVA

SEQ ID NO: 155884 - protein, 9 aa, Homo Sapiens
VVDKCDEPL

SEQ ID NO: 155885 - protein, 9 aa, Homo Sapiens
VVDKCTEVL

SEQ ID NO: 155886 - protein, 9 aa, Homo Sapiens
VVDKPEQTV

SEQ ID NO: 155887 - protein, 9 aa, Homo Sapiens
VVDKPPSTM

SEQ ID NO: 155888 - protein, 9 aa, Homo Sapiens
VVDLAPLHL

SEQ ID NO: 155889 - protein, 9 aa, Homo Sapiens
VVDLDTSQL

SEQ ID NO: 155890 - protein, 9 aa, Homo Sapiens
VVDLGGLSI

SEQ ID NO: 155891 - protein, 9 aa, Homo Sapiens
VVDLLQQEL

SEQ ID NO: 155892 - protein, 9 aa, Homo Sapiens
VVDNQTEKL

SEQ ID NO: 155893 - protein, 9 aa, Homo Sapiens
VVDQGSTNL

SEQ ID NO: 155894 - protein, 9 aa, Homo Sapiens
VVDSEDIPL

SEQ ID NO: 155895 - protein, 9 aa, Homo Sapiens
VVDSEVPSL

SEQ ID NO: 155896 - protein, 9 aa, Homo Sapiens
VVDSIMTAL

SEQ ID NO: 155897 - protein, 9 aa, Homo Sapiens
VVDSSNTAL

SEQ ID NO: 155898 - protein, 9 aa, Homo Sapiens
VVDVTSLSL

SEQ ID NO: 155899 - protein, 9 aa, Homo Sapiens
VVDYPNSAK

SEQ ID NO: 155900 - protein, 9 aa, Homo Sapiens
VVEPYNATL

SEQ ID NO: 155901 - protein, 9 aa, Homo Sapiens
VVEVPSAVL

SEQ ID NO: 155902 - protein, 9 aa, Homo Sapiens
VWDIVGTEL

SEQ ID NO: 155903 - protein, 9 aa, Homo Sapiens
VWDVIGRSL

SEQ ID NO: 155904 - protein, 9 aa, Homo Sapiens
WTDFPGRVL

SEQ ID NO: 155905 - protein, 9 aa, Homo Sapiens
YADDNSLLF

SEQ ID NO: 155906 - protein, 9 aa, Homo Sapiens
YADEKGLEA

SEQ ID NO: 155907 - protein, 9 aa, Homo Sapiens
YADFAPSLL

SEQ ID NO: 155908 - protein, 9 aa, Homo Sapiens
YADFGPLNL

SEQ ID NO: 155909 - protein, 9 aa, Homo Sapiens
YADFPELDL

SEQ ID NO: 155910 - protein, 9 aa, Homo Sapiens
YADGGGCKL

SEQ ID NO: 155911 - protein, 9 aa, Homo Sapiens
YADHPFIFL

SEQ ID NO: 155912 - protein, 9 aa, Homo Sapiens
YADIEAAWL

SEQ ID NO: 155913 - protein, 9 aa, Homo Sapiens
YADIFPSKV

SEQ ID NO: 155914 - protein, 9 aa, Homo Sapiens
YADIGGMDI

SEQ ID NO: 155915 - protein, 9 aa, Homo Sapiens
YADIVQLLL

SEQ ID NO: 155916 - protein, 9 aa, Homo Sapiens
YADPVADLL

SEQ ID NO: 155917 - protein, 9 aa, Homo Sapiens
YADPVTDLL

SEQ ID NO: 155918 - protein, 9 aa, Homo Sapiens
YADQHSVQV

SEQ ID NO: 155919 - protein, 9 aa, Homo Sapiens
YADQLKEYL

SEQ ID NO: 155920 - protein, 9 aa, Homo Sapiens
YADTQEINL

SEQ ID NO: 155921 - protein, 9 aa, Homo Sapiens
YADTVTTVI

SEQ ID NO: 155922 - protein, 9 aa, Homo Sapiens
YADVGGKQF

SEQ ID NO: 155923 - protein, 9 aa, Homo Sapiens
YADVQKDGV

SEQ ID NO: 155924 - protein, 9 aa, Homo Sapiens
YADYIGFIL

SEQ ID NO: 155925 - protein, 9 aa, Homo Sapiens
YAEEFRTYL

SEQ ID NO: 155926 - protein, 9 aa, Homo Sapiens
YAEIPDETL

SEQ ID NO: 155927 - protein, 9 aa, Homo Sapiens
YAEQLHVQL

SEQ ID NO: 155928 - protein, 9 aa, Homo Sapiens
YAEQLVVEL

SEQ ID NO: 155929 - protein, 9 aa, Homo Sapiens
YAEVGRVLL

SEQ ID NO: 155930 - protein, 9 aa, Homo Sapiens
YAEYMPIKL

SEQ ID NO: 155931 - protein, 9 aa, Homo Sapiens
YCDERITEL

SEQ ID NO: 155932 - protein, 9 aa, Homo Sapiens
YFDAIPVTM

SEQ ID NO: 155933 - protein, 9 aa, Homo Sapiens
YFDDSNVSL

SEQ ID NO: 155934 - protein, 9 aa, Homo Sapiens
YFDLQTHVI

SEQ ID NO: 155935 - protein, 9 aa, Homo Sapiens
YGDEIAIEL

SEQ ID NO: 155936 - protein, 9 aa, Homo Sapiens
YGDESTLAF

SEQ ID NO: 155937 - protein, 9 aa, Homo Sapiens
YGDKIIEEL

SEQ ID NO: 155938 - protein, 9 aa, Homo Sapiens
YGDKQSNAL

SEQ ID NO: 155939 - protein, 9 aa, Homo Sapiens
YGDLGGPII

SEQ ID NO: 155940 - protein, 9 aa, Homo Sapiens
YGDPYYSYL

SEQ ID NO: 155941 - protein, 9 aa, Homo Sapiens
YIDDVFHAL

SEQ ID NO: 155942 - protein, 9 aa, Homo Sapiens
YIDEGRLVL

SEQ ID NO: 155943 - protein, 9 aa, Homo Sapiens
YIDLPPPRL

SEQ ID NO: 155944 - protein, 9 aa, Homo Sapiens
YIDQDMQVL

SEQ ID NO: 155945 - protein, 9 aa, Homo Sapiens
YIDQGIAEL

SEQ ID NO: 155946 - protein, 9 aa, Homo Sapiens
YIDRDSEYL

SEQ ID NO: 155947 - protein, 9 aa, Homo Sapiens
YIDYEFSVL

SEQ ID NO: 155948 - protein, 9 aa, Homo Sapiens
YIEDQKLVL

SEQ ID NO: 155949 - protein, 9 aa, Homo Sapiens
YLDGVGDTL

SEQ ID NO: 155950 - protein, 9 aa, Homo Sapiens
YLDGVHTVF

SEQ ID NO: 155951 - protein, 9 aa, Homo Sapiens
YLDLPSVTI

SEQ ID NO: 155952 - protein, 9 aa, Homo Sapiens
YLDLSNNRL

SEQ ID NO: 155953 - protein, 9 aa, Homo Sapiens
YLDPVQRDL

SEQ ID NO: 155954 - protein, 9 aa, Homo Sapiens
YLDWDVSEL

SEQ ID NO: 155955 - protein, 9 aa, Homo Sapiens
YLEDSPLEL

SEQ ID NO: 155956 - protein, 9 aa, Homo Sapiens
YLEEPLTQV

SEQ ID NO: 155957 - protein, 9 aa, Homo Sapiens
YLENEPLML

SEQ ID NO: 155958 - protein, 9 aa, Homo Sapiens
YMDAPKAAL

SEQ ID NO: 155959 - protein, 9 aa, Homo Sapiens
YNDDKNTYI

SEQ ID NO: 155960 - protein, 9 aa, Homo Sapiens
YNDFINKEL

SEQ ID NO: 155961 - protein, 9 aa, Homo Sapiens
YQDLLNVKM

SEQ ID NO: 155962 - protein, 9 aa, Homo Sapiens
YQDPDATSL

SEQ ID NO: 155963 - protein, 9 aa, Homo Sapiens
YQDQEQRIL

SEQ ID NO: 155964 - protein, 9 aa, Homo Sapiens
YQDTHPERL

SEQ ID NO: 155965 - protein, 9 aa, Homo Sapiens
YQDVGSLNI

SEQ ID NO: 155966 - protein, 9 aa, Homo Sapiens
YSCDHNTSL

SEQ ID NO: 155967 - protein, 9 aa, Homo Sapiens
YSDAPVSEL

SEQ ID NO: 155968 - protein, 9 aa, Homo Sapiens
YSDATTSKI

SEQ ID NO: 155969 - protein, 9 aa, Homo Sapiens
YSDDDVPSV

SEQ ID NO: 155970 - protein, 9 aa, Homo Sapiens
YSDDIPHAL

SEQ ID NO: 155971 - protein, 9 aa, Homo Sapiens
YSDDKVHAI

SEQ ID NO: 155972 - protein, 9 aa, Homo Sapiens
YSDELQSVI

SEQ ID NO: 155973 - protein, 9 aa, Homo Sapiens
YSDEVRNEL

SEQ ID NO: 155974 - protein, 9 aa, Homo Sapiens
YSDFVVHEI

SEQ ID NO: 155975 - protein, 9 aa, Homo Sapiens
YSDGKLQTV

SEQ ID NO: 155976 - protein, 9 aa, Homo Sapiens
YSDGPGEAL

SEQ ID NO: 155977 - protein, 9 aa, Homo Sapiens
YSDGRSLHL

SEQ ID NO: 155978 - protein, 9 aa, Homo Sapiens
YSDHSWVVM

SEQ ID NO: 155979 - protein, 9 aa, Homo Sapiens
YSDLADLML

SEQ ID NO: 155980 - protein, 9 aa, Homo Sapiens
YSDLRKESM

SEQ ID NO: 155981 - protein, 9 aa, Homo Sapiens
YSDMPPLTL

SEQ ID NO: 155982 - protein, 9 aa, Homo Sapiens
YSDNQPGVL

SEQ ID NO: 155983 - protein, 9 aa, Homo Sapiens
YSDPRFLNL

SEQ ID NO: 155984 - protein, 9 aa, Homo Sapiens
YSDPVTLET

SEQ ID NO: 155985 - protein, 9 aa, Homo Sapiens
YSDQPEIAL

SEQ ID NO: 155986 - protein, 9 aa, Homo Sapiens
YSDSAGSFL

SEQ ID NO: 155987 - protein, 9 aa, Homo Sapiens
YSDSFPMEL

SEQ ID NO: 155988 - protein, 9 aa, Homo Sapiens
YSDTQFPSL

SEQ ID NO: 155989 - protein, 9 aa, Homo Sapiens
YSDVEHTSV

SEQ ID NO: 155990 - protein, 9 aa, Homo Sapiens
YSDVHNCSY

SEQ ID NO: 155991 - protein, 9 aa, Homo Sapiens
YSDVILEVL

SEQ ID NO: 155992 - protein, 9 aa, Homo Sapiens
YTDDFTDRL

SEQ ID NO: 155993 - protein, 9 aa, Homo Sapiens
YTDFDGTRV

SEQ ID NO: 155994 - protein, 9 aa, Homo Sapiens
YTDHQFTEL

SEQ ID NO: 155995 - protein, 9 aa, Homo Sapiens
YTDIINIFL

SEQ ID NO: 155996 - protein, 9 aa, Homo Sapiens
YTDIVGLLL

SEQ ID NO: 155997 - protein, 9 aa, Homo Sapiens
YTDKIMTYL

SEQ ID NO: 155998 - protein, 9 aa, Homo Sapiens
YTDLPNRQL

SEQ ID NO: 155999 - protein, 9 aa, Homo Sapiens
YTDLVPKEV

SEQ ID NO: 156000 - protein, 9 aa, Homo Sapiens
YTDPDHASL

SEQ ID NO: 156001 - protein, 9 aa, Homo Sapiens
YTDRETGKL

SEQ ID NO: 156002 - protein, 9 aa, Homo Sapiens
YTDVNIVTI

SEQ ID NO: 156003 - protein, 9 aa, Homo Sapiens
YTEDEAKEL

SEQ ID NO: 156004 - protein, 9 aa, Homo Sapiens
YVAQAGLEL

SEQ ID NO: 156005 - protein, 9 aa, Homo Sapiens
YVDAVGQFL

SEQ ID NO: 156006 - protein, 9 aa, Homo Sapiens
YVDDFGVSV

SEQ ID NO: 156007 - protein, 9 aa, Homo Sapiens
YVDDGLISL

SEQ ID NO: 156008 - protein, 9 aa, Homo Sapiens
YVDEHGTRL

SEQ ID NO: 156009 - protein, 9 aa, Homo Sapiens
YVDEIASVL

SEQ ID NO: 156010 - protein, 9 aa, Homo Sapiens
YVDESRECV

SEQ ID NO: 156011 - protein, 9 aa, Homo Sapiens
YVDEVMTRL

SEQ ID NO: 156012 - protein, 9 aa, Homo Sapiens
YVDGRVLVV

SEQ ID NO: 156013 - protein, 9 aa, Homo Sapiens
YVDISENHL

SEQ ID NO: 156014 - protein, 9 aa, Homo Sapiens
YVDISIIAL

SEQ ID NO: 156015 - protein, 9 aa, Homo Sapiens
YVDLIEEQL

SEQ ID NO: 156016 - protein, 9 aa, Homo Sapiens
YVDNRFFTL

SEQ ID NO: 156017 - protein, 9 aa, Homo Sapiens
YVDPVNKVL

SEQ ID NO: 156018 - protein, 9 aa, Homo Sapiens
YVDRVTEFL

SEQ ID NO: 156019 - protein, 9 aa, Homo Sapiens
YVDSALKPL

SEQ ID NO: 156020 - protein, 9 aa, Homo Sapiens
YVDVQKFPL

SEQ ID NO: 156021 - protein, 9 aa, Homo Sapiens
YVDVVKVLL

SEQ ID NO: 156022 - protein, 9 aa, Homo Sapiens
YYDEIINAL

SEQ ID NO: 156023 - protein, 9 aa, Homo Sapiens
YYDLVRTEI

SEQ ID NO: 156024 - protein, 9 aa, Homo Sapiens
YYEEQHPEL

SEQ ID NO: 156025 - protein, 10 aa, Homo Sapiens
AADFEIGHFL

SEQ ID NO: 156026 - protein, 10 aa, Homo Sapiens
AADGEFLHEL

SEQ ID NO: 156027 - protein, 10 aa, Homo Sapiens
AADGGLRASV

SEQ ID NO: 156028 - protein, 10 aa, Homo Sapiens
AADGGPRVSF

SEQ ID NO: 156029 - protein, 10 aa, Homo Sapiens
AADGKGVVVV

SEQ ID NO: 156030 - protein, 10 aa, Homo Sapiens
AADGRGLQTV

SEQ ID NO: 156031 - protein, 10 aa, Homo Sapiens
AADGSLGRLA

SEQ ID NO: 156032 - protein, 10 aa, Homo Sapiens
AADIDTRSEF

SEQ ID NO: 156033 - protein, 10 aa, Homo Sapiens
AADKAAVVKF

SEQ ID NO: 156034 - protein, 10 aa, Homo Sapiens
AADKSAVVAA

SEQ ID NO: 156035 - protein, 10 aa, Homo Sapiens
AADPGLHETL

SEQ ID NO: 156036 - protein, 10 aa, Homo Sapiens
AADPGLPARL

SEQ ID NO: 156037 - protein, 10 aa, Homo Sapiens
AADPGPGAEL

SEQ ID NO: 156038 - protein, 10 aa, Homo Sapiens
AADTPPLETL

SEQ ID NO: 156039 - protein, 10 aa, Homo Sapiens
AADVAQSTHV

SEQ ID NO: 156040 - protein, 10 aa, Homo Sapiens
AADWIRISEM

SEQ ID NO: 156041 - protein, 10 aa, Homo Sapiens
AAEEPHALEL

SEQ ID NO: 156042 - protein, 10 aa, Homo Sapiens
AAETGSGKTL

SEQ ID NO: 156043 - protein, 10 aa, Homo Sapiens
AAPPAEKAPV

SEQ ID NO: 156044 - protein, 10 aa, Homo Sapiens
ALDASQHSSL

SEQ ID NO: 156045 - protein, 10 aa, Homo Sapiens
ASDGSFSLPL

SEQ ID NO: 156046 - protein, 10 aa, Homo Sapiens
ASDKPSQETL

SEQ ID NO: 156047 - protein, 10 aa, Homo Sapiens
ATDNNCHVTL

SEQ ID NO: 156048 - protein, 10 aa, Homo Sapiens
ATDYQGNTAL

SEQ ID NO: 156049 - protein, 10 aa, Homo Sapiens
AVDGGLSIPH

SEQ ID NO: 156050 - protein, 10 aa, Homo Sapiens
AVDGKEMVTM

SEQ ID NO: 156051 - protein, 10 aa, Homo Sapiens
AVDKANLEIM

SEQ ID NO: 156052 - protein, 10 aa, Homo Sapiens
AVDPNRAVPL

SEQ ID NO: 156053 - protein, 10 aa, Homo Sapiens
AVDQASHQSL

SEQ ID NO: 156054 - protein, 10 aa, Homo Sapiens
AVDTSSEITT

SEQ ID NO: 156055 - protein, 10 aa, Homo Sapiens
CADLLDRQIL

SEQ ID NO: 156056 - protein, 10 aa, Homo Sapiens
CQDPKEPRAL

SEQ ID NO: 156057 - protein, 10 aa, Homo Sapiens
DPPWDIHMEL

SEQ ID NO: 156058 - protein, 10 aa, Homo Sapiens
EEGAPSAAAL

SEQ ID NO: 156059 - protein, 10 aa, Homo Sapiens
ESDLPSAVTL

SEQ ID NO: 156060 - protein, 10 aa, Homo Sapiens
ESDPGVFTEL

SEQ ID NO: 156061 - protein, 10 aa, Homo Sapiens
FADAHNMLLF

SEQ ID NO: 156062 - protein, 10 aa, Homo Sapiens
FADASKGDDL

SEQ ID NO: 156063 - protein, 10 aa, Homo Sapiens
FADDNRFDFL

SEQ ID NO: 156064 - protein, 10 aa, Homo Sapiens
FADDPCSSVK

SEQ ID NO: 156065 - protein, 10 aa, Homo Sapiens
FADDQIAQSL

SEQ ID NO: 156066 - protein, 10 aa, Homo Sapiens
FADEKPLQDM

SEQ ID NO: 156067 - protein, 10 aa, Homo Sapiens
FADENNEKLF

SEQ ID NO: 156068 - protein, 10 aa, Homo Sapiens
FADGHVLELL

SEQ ID NO: 156069 - protein, 10 aa, Homo Sapiens
FADGILPLDL

SEQ ID NO: 156070 - protein, 10 aa, Homo Sapiens
FADGVPREGL

SEQ ID NO: 156071 - protein, 10 aa, Homo Sapiens
FADILNDVAM

SEQ ID NO: 156072 - protein, 10 aa, Homo Sapiens
FADISSQILF

SEQ ID NO: 156073 - protein, 10 aa, Homo Sapiens
FADIVGFTQL

SEQ ID NO: 156074 - protein, 10 aa, Homo Sapiens
FADKETLIQF

SEQ ID NO: 156075 - protein, 10 aa, Homo Sapiens
FADKSKQEAL

SEQ ID NO: 156076 - protein, 10 aa, Homo Sapiens
FADLNLVQAL

SEQ ID NO: 156077 - protein, 10 aa, Homo Sapiens
FADPNMLDTL

SEQ ID NO: 156078 - protein, 10 aa, Homo Sapiens
FADPVDVNPF

SEQ ID NO: 156079 - protein, 10 aa, Homo Sapiens
FADSDSHSSF

SEQ ID NO: 156080 - protein, 10 aa, Homo Sapiens
FADSFDRGTL

SEQ ID NO: 156081 - protein, 10 aa, Homo Sapiens
FADSHELSEL

SEQ ID NO: 156082 - protein, 10 aa, Homo Sapiens
FAEHGETLAM

SEQ ID NO: 156083 - protein, 10 aa, Homo Sapiens
FAEPGSEVYL

SEQ ID NO: 156084 - protein, 10 aa, Homo Sapiens
FGDFDIKTVL

SEQ ID NO: 156085 - protein, 10 aa, Homo Sapiens
FGDPECQVIL

SEQ ID NO: 156086 - protein, 10 aa, Homo Sapiens
FIDKNGETEL

SEQ ID NO: 156087 - protein, 10 aa, Homo Sapiens
FIDPSSGLAF

SEQ ID NO: 156088 - protein, 10 aa, Homo Sapiens
FIEDCEFTVL

SEQ ID NO: 156089 - protein, 10 aa, Homo Sapiens
FLDDEVTVPL

SEQ ID NO: 156090 - protein, 10 aa, Homo Sapiens
FLDNSLDTVL

SEQ ID NO: 156091 - protein, 10 aa, Homo Sapiens
FLDPPPYETL

SEQ ID NO: 156092 - protein, 10 aa, Homo Sapiens
FLEEVGSQAL

SEQ ID NO: 156093 - protein, 10 aa, Homo Sapiens
FMDDTSRSII

SEQ ID NO: 156094 - protein, 10 aa, Homo Sapiens
FNDSDSGISL

SEQ ID NO: 156095 - protein, 10 aa, Homo Sapiens
FSDPAVSQSL

SEQ ID NO: 156096 - protein, 10 aa, Homo Sapiens
FTDEESRVFL

SEQ ID NO: 156097 - protein, 10 aa, Homo Sapiens
FTDSGIHIIL

SEQ ID NO: 156098 - protein, 10 aa, Homo Sapiens
FVDCPGHDIL

SEQ ID NO: 156099 - protein, 10 aa, Homo Sapiens
FVDDETKLTL

SEQ ID NO: 156100 - protein, 10 aa, Homo Sapiens
FVDDGTETHF

SEQ ID NO: 156101 - protein, 10 aa, Homo Sapiens
FVDEGSLYGL

SEQ ID NO: 156102 - protein, 10 aa, Homo Sapiens
FVDGSAIQVL

SEQ ID NO: 156103 - protein, 10 aa, Homo Sapiens
FVDNFVHADL

SEQ ID NO: 156104 - protein, 10 aa, Homo Sapiens
FVDPNGKISL

SEQ ID NO: 156105 - protein, 10 aa, Homo Sapiens
FVDPSQDHAL

SEQ ID NO: 156106 - protein, 10 aa, Homo Sapiens
FVDSGAPPAL

SEQ ID NO: 156107 - protein, 10 aa, Homo Sapiens
FVDTDADTRL

SEQ ID NO: 156108 - protein, 10 aa, Homo Sapiens
FVDTSDCTVM

SEQ ID NO: 156109 - protein, 10 aa, Homo Sapiens
FVEDASGKGL

SEQ ID NO: 156110 - protein, 10 aa, Homo Sapiens
FVEDTECRTL

SEQ ID NO: 156111 - protein, 10 aa, Homo Sapiens
GADDPSSVTA

SEQ ID NO: 156112 - protein, 10 aa, Homo Sapiens
GGVMDVNTAL

SEQ ID NO: 156113 - protein, 10 aa, Homo Sapiens
GSDPPSGDFL

SEQ ID NO: 156114 - protein, 10 aa, Homo Sapiens
HADAPTNKTL

SEQ ID NO: 156115 - protein, 10 aa, Homo Sapiens
HADDCVGLEL

SEQ ID NO: 156116 - protein, 10 aa, Homo Sapiens
HADGERPNVL

SEQ ID NO: 156117 - protein, 10 aa, Homo Sapiens
HADSNIVIML

SEQ ID NO: 156118 - protein, 10 aa, Homo Sapiens
HADSVTGLSL

SEQ ID NO: 156119 - protein, 10 aa, Homo Sapiens
HADTGSIRSL

SEQ ID NO: 156120 - protein, 10 aa, Homo Sapiens
HADTPVDHCL

SEQ ID NO: 156121 - protein, 10 aa, Homo Sapiens
HIDGDHLTLL

SEQ ID NO: 156122 - protein, 10 aa, Homo Sapiens
HIDPKTGVAV

SEQ ID NO: 156123 - protein, 10 aa, Homo Sapiens
HIDRDVLIVL

SEQ ID NO: 156124 - protein, 10 aa, Homo Sapiens
HIDSEAISAL

SEQ ID NO: 156125 - protein, 10 aa, Homo Sapiens
HLDLPSNNNL

SEQ ID NO: 156126 - protein, 10 aa, Homo Sapiens
HSDDYVHISL

SEQ ID NO: 156127 - protein, 10 aa, Homo Sapiens
HSDVAYHNSL

SEQ ID NO: 156128 - protein, 10 aa, Homo Sapiens
IADDYLRTFL

SEQ ID NO: 156129 - protein, 10 aa, Homo Sapiens
IADGNPKLTL

SEQ ID NO: 156130 - protein, 10 aa, Homo Sapiens
IADGNPSLVL

SEQ ID NO: 156131 - protein, 10 aa, Homo Sapiens
IADISSPPVL

SEQ ID NO: 156132 - protein, 10 aa, Homo Sapiens
IADMASAVEI

SEQ ID NO: 156133 - protein, 10 aa, Homo Sapiens
IADNHTPKEL

SEQ ID NO: 156134 - protein, 10 aa, Homo Sapiens
IADNRPSVEF

SEQ ID NO: 156135 - protein, 10 aa, Homo Sapiens
IADPKTDHRL

SEQ ID NO: 156136 - protein, 10 aa, Homo Sapiens
IADSHQNFAL

SEQ ID NO: 156137 - protein, 10 aa, Homo Sapiens
IADTGANVVV

SEQ ID NO: 156138 - protein, 10 aa, Homo Sapiens
IADVSTGLEL

SEQ ID NO: 156139 - protein, 10 aa, Homo Sapiens
IAEEASKVCL

SEQ ID NO: 156140 - protein, 10 aa, Homo Sapiens
ICDLGGVNEL

SEQ ID NO: 156141 - protein, 10 aa, Homo Sapiens
IHDPGRGAPL

SEQ ID NO: 156142 - protein, 10 aa, Homo Sapiens
IIDAPDISSL

SEQ ID NO: 156143 - protein, 10 aa, Homo Sapiens
IIDDPSGNSF

SEQ ID NO: 156144 - protein, 10 aa, Homo Sapiens
IIDGNPSIIL

SEQ ID NO: 156145 - protein, 10 aa, Homo Sapiens
IIDPNHEIEF

SEQ ID NO: 156146 - protein, 10 aa, Homo Sapiens
IIDTANTTEM

SEQ ID NO: 156147 - protein, 10 aa, Homo Sapiens
IIDTKGVTAL

SEQ ID NO: 156148 - protein, 10 aa, Homo Sapiens
IIDTPGHESF

SEQ ID NO: 156149 - protein, 10 aa, Homo Sapiens
ILDDVSLTHL

SEQ ID NO: 156150 - protein, 10 aa, Homo Sapiens
ILDGRPGNPL

SEQ ID NO: 156151 - protein, 10 aa, Homo Sapiens
ISDEISIMTL

SEQ ID NO: 156152 - protein, 10 aa, Homo Sapiens
ISDGPSKVTL

SEQ ID NO: 156153 - protein, 10 aa, Homo Sapiens
ITDADQIRAL

SEQ ID NO: 156154 - protein, 10 aa, Homo Sapiens
ITDPYQQAFL

SEQ ID NO: 156155 - protein, 10 aa, Homo Sapiens
IVDDCGGAFT

SEQ ID NO: 156156 - protein, 10 aa, Homo Sapiens
IVDGHSVEEL

SEQ ID NO: 156157 - protein, 10 aa, Homo Sapiens
KADAASSLTV

SEQ ID NO: 156158 - protein, 10 aa, Homo Sapiens
KADAISKSEL

SEQ ID NO: 156159 - protein, 10 aa, Homo Sapiens
KADGIVSKNF

SEQ ID NO: 156160 - protein, 10 aa, Homo Sapiens
KADKNYSVNL

SEQ ID NO: 156161 - protein, 10 aa, Homo Sapiens
KADLPEGVAV

SEQ ID NO: 156162 - protein, 10 aa, Homo Sapiens
KADPCVAHAL

SEQ ID NO: 156163 - protein, 10 aa, Homo Sapiens
KADPGRQESL

SEQ ID NO: 156164 - protein, 10 aa, Homo Sapiens
KADTIAKNEL

SEQ ID NO: 156165 - protein, 10 aa, Homo Sapiens
KADTISKSEL

SEQ ID NO: 156166 - protein, 10 aa, Homo Sapiens
KADTNGIIKT

SEQ ID NO: 156167 - protein, 10 aa, Homo Sapiens
KADTVSKTEL

SEQ ID NO: 156168 - protein, 10 aa, Homo Sapiens
KADVQSIIGL

SEQ ID NO: 156169 - protein, 10 aa, Homo Sapiens
KAEPPQCTSL

SEQ ID NO: 156170 - protein, 10 aa, Homo Sapiens
KGDNSSVSSL

SEQ ID NO: 156171 - protein, 10 aa, Homo Sapiens
KLDFGETTVL

SEQ ID NO: 156172 - protein, 10 aa, Homo Sapiens
KQDGSPSTEL

SEQ ID NO: 156173 - protein, 10 aa, Homo Sapiens
KSDDKNTVNL

SEQ ID NO: 156174 - protein, 10 aa, Homo Sapiens
KSDDLPHWVL

SEQ ID NO: 156175 - protein, 10 aa, Homo Sapiens
KSDDPIVTSL

SEQ ID NO: 156176 - protein, 10 aa, Homo Sapiens
KSDEGGKVLL

SEQ ID NO: 156177 - protein, 10 aa, Homo Sapiens
KSDQSYVISF

SEQ ID NO: 156178 - protein, 10 aa, Homo Sapiens
KSDVSSLIFL

SEQ ID NO: 156179 - protein, 10 aa, Homo Sapiens
KSGLDLNTSL

SEQ ID NO: 156180 - protein, 10 aa, Homo Sapiens
KTDEGSRLSL

SEQ ID NO: 156181 - protein, 10 aa, Homo Sapiens
KVDEVGGEAL

SEQ ID NO: 156182 - protein, 10 aa, Homo Sapiens
LADDLKIESL

SEQ ID NO: 156183 - protein, 10 aa, Homo Sapiens
LADFGVAGQL

SEQ ID NO: 156184 - protein, 10 aa, Homo Sapiens
LADLPQSIGM

SEQ ID NO: 156185 - protein, 10 aa, Homo Sapiens
LADPSTTGQM

SEQ ID NO: 156186 - protein, 10 aa, Homo Sapiens
LADTSDSRAL

SEQ ID NO: 156187 - protein, 10 aa, Homo Sapiens
LDSITPEVLP

SEQ ID NO: 156188 - protein, 10 aa, Homo Sapiens
LGDGLGHVEL

SEQ ID NO: 156189 - protein, 10 aa, Homo Sapiens
LIDFGSGALL

SEQ ID NO: 156190 - protein, 10 aa, Homo Sapiens
LIDLPGHESL

SEQ ID NO: 156191 - protein, 10 aa, Homo Sapiens
LLDDRGMTAL

SEQ ID NO: 156192 - protein, 10 aa, Homo Sapiens
LSDEENLKLF

SEQ ID NO: 156193 - protein, 10 aa, Homo Sapiens
LSDGRDLVSL

SEQ ID NO: 156194 - protein, 10 aa, Homo Sapiens
LSDPQVHTVL

SEQ ID NO: 156195 - protein, 10 aa, Homo Sapiens
LTDMSRPVEL

SEQ ID NO: 156196 - protein, 10 aa, Homo Sapiens
LVADAKDNSI

SEQ ID NO: 156197 - protein, 10 aa, Homo Sapiens
LVDDSFSQAL

SEQ ID NO: 156198 - protein, 10 aa, Homo Sapiens
LVDISQDNAL

SEQ ID NO: 156199 - protein, 10 aa, Homo Sapiens
LVDWSSGNVL

SEQ ID NO: 156200 - protein, 10 aa, Homo Sapiens
MADEALGSGL

SEQ ID NO: 156201 - protein, 10 aa, Homo Sapiens
MADTGKLNTL

SEQ ID NO: 156202 - protein, 10 aa, Homo Sapiens
MQDESSQTSL

SEQ ID NO: 156203 - protein, 10 aa, Homo Sapiens
NADDCYQSKL

SEQ ID NO: 156204 - protein, 10 aa, Homo Sapiens
NADDMAETVL

SEQ ID NO: 156205 - protein, 10 aa, Homo Sapiens
NADDVVATAL

SEQ ID NO: 156206 - protein, 10 aa, Homo Sapiens
NADEASTAEL

SEQ ID NO: 156207 - protein, 10 aa, Homo Sapiens
NADELLESFL

SEQ ID NO: 156208 - protein, 10 aa, Homo Sapiens
NADGPAPLEL

SEQ ID NO: 156209 - protein, 10 aa, Homo Sapiens
NADGPGFHSL

SEQ ID NO: 156210 - protein, 10 aa, Homo Sapiens
NADGPNPWML

SEQ ID NO: 156211 - protein, 10 aa, Homo Sapiens
NADPSVINCL

SEQ ID NO: 156212 - protein, 10 aa, Homo Sapiens
NAENPRGTFL

SEQ ID NO: 156213 - protein, 10 aa, Homo Sapiens
NAESGRGQVM

SEQ ID NO: 156214 - protein, 10 aa, Homo Sapiens
NSDDSSRNLF

SEQ ID NO: 156215 - protein, 10 aa, Homo Sapiens
NSDPGTETEL

SEQ ID NO: 156216 - protein, 10 aa, Homo Sapiens
NVDAFKLESL

SEQ ID NO: 156217 - protein, 10 aa, Homo Sapiens
NVDIATTEAL

SEQ ID NO: 156218 - protein, 10 aa, Homo Sapiens
PEVKFNWYVD

SEQ ID NO: 156219 - protein, 10 aa, Homo Sapiens
QADEANKRLL

SEQ ID NO: 156220 - protein, 10 aa, Homo Sapiens
QAEEPRGSSL

SEQ ID NO: 156221 - protein, 10 aa, Homo Sapiens
RADGENTAFL

SEQ ID NO: 156222 - protein, 10 aa, Homo Sapiens
RADGLGIPQL

SEQ ID NO: 156223 - protein, 10 aa, Homo Sapiens
RADPGVLAAL

SEQ ID NO: 156224 - protein, 10 aa, Homo Sapiens
RADTDGGLIF

SEQ ID NO: 156225 - protein, 10 aa, Homo Sapiens
RIDGGITGAL

SEQ ID NO: 156226 - protein, 10 aa, Homo Sapiens
RIDGGITGNM

SEQ ID NO: 156227 - protein, 10 aa, Homo Sapiens
RMDGEGQLTL

SEQ ID NO: 156228 - protein, 10 aa, Homo Sapiens
RSDVPSLVTF

SEQ ID NO: 156229 - protein, 10 aa, Homo Sapiens
RTDGKVFQFL

SEQ ID NO: 156230 - protein, 10 aa, Homo Sapiens
SADEPGVMYL

SEQ ID NO: 156231 - protein, 10 aa, Homo Sapiens
SADEPMTTFV

SEQ ID NO: 156232 - protein, 10 aa, Homo Sapiens
SADESGQALL

SEQ ID NO: 156233 - protein, 10 aa, Homo Sapiens
SADESGQIFI

SEQ ID NO: 156234 - protein, 10 aa, Homo Sapiens
SADETFTHHL

SEQ ID NO: 156235 - protein, 10 aa, Homo Sapiens
SADGSQAQNL

SEQ ID NO: 156236 - protein, 10 aa, Homo Sapiens
SADIESILAL

SEQ ID NO: 156237 - protein, 10 aa, Homo Sapiens
SADKGGFLYL

SEQ ID NO: 156238 - protein, 10 aa, Homo Sapiens
SADLPPPSAL

SEQ ID NO: 156239 - protein, 10 aa, Homo Sapiens
SADPFPQVKL

SEQ ID NO: 156240 - protein, 10 aa, Homo Sapiens
SADPGVFVLL

SEQ ID NO: 156241 - protein, 10 aa, Homo Sapiens
SADPLPNSYL

SEQ ID NO: 156242 - protein, 10 aa, Homo Sapiens
SADSAEAHSL

SEQ ID NO: 156243 - protein, 10 aa, Homo Sapiens
SADTPCATVL

SEQ ID NO: 156244 - protein, 10 aa, Homo Sapiens
SADVPLVVEY

SEQ ID NO: 156245 - protein, 10 aa, Homo Sapiens
SAEEGGAARL

SEQ ID NO: 156246 - protein, 10 aa, Homo Sapiens
SAELGSSTSL

SEQ ID NO: 156247 - protein, 10 aa, Homo Sapiens
SAEQASILSL

SEQ ID NO: 156248 - protein, 10 aa, Homo Sapiens
SFGGGSFGGG

SEQ ID NO: 156249 - protein, 10 aa, Homo Sapiens
SIDKGDTPSL

SEQ ID NO: 156250 - protein, 10 aa, Homo Sapiens
SIDLPGIKGL

SEQ ID NO: 156251 - protein, 10 aa, Homo Sapiens
SIDSEGRTVL

SEQ ID NO: 156252 - protein, 10 aa, Homo Sapiens
SLDDRVLSSL

SEQ ID NO: 156253 - protein, 10 aa, Homo Sapiens
SSDGEALFAL

SEQ ID NO: 156254 - protein, 10 aa, Homo Sapiens
STDKGPNSAL

SEQ ID NO: 156255 - protein, 10 aa, Homo Sapiens
SVDGSPTTAF

SEQ ID NO: 156256 - protein, 10 aa, Homo Sapiens
SVGESSSKGP

SEQ ID NO: 156257 - protein, 10 aa, Homo Sapiens
TADDINKVVL

SEQ ID NO: 156258 - protein, 10 aa, Homo Sapiens
TADDPSLSLI

SEQ ID NO: 156259 - protein, 10 aa, Homo Sapiens
TADDQRSSSL

SEQ ID NO: 156260 - protein, 10 aa, Homo Sapiens
TADFSGDVTL

SEQ ID NO: 156261 - protein, 10 aa, Homo Sapiens
TADGLPVGVL

SEQ ID NO: 156262 - protein, 10 aa, Homo Sapiens
TADKGWQNSI

SEQ ID NO: 156263 - protein, 10 aa, Homo Sapiens
TADNHGYTAL

SEQ ID NO: 156264 - protein, 10 aa, Homo Sapiens
TADNVLTLSL

SEQ ID NO: 156265 - protein, 10 aa, Homo Sapiens
TADPGATMTF

SEQ ID NO: 156266 - protein, 10 aa, Homo Sapiens
TADPLSNMVL

SEQ ID NO: 156267 - protein, 10 aa, Homo Sapiens
TAEDPSKSYV

SEQ ID NO: 156268 - protein, 10 aa, Homo Sapiens
TAEEPTGVFL

SEQ ID NO: 156269 - protein, 10 aa, Homo Sapiens
TAVEGDEVSL

SEQ ID NO: 156270 - protein, 10 aa, Homo Sapiens
TIDAEVMNSL

SEQ ID NO: 156271 - protein, 10 aa, Homo Sapiens
TIDDRIVHEL

SEQ ID NO: 156272 - protein, 10 aa, Homo Sapiens
TIDFTPGSEL

SEQ ID NO: 156273 - protein, 10 aa, Homo Sapiens
TIDGSKTCTI

SEQ ID NO: 156274 - protein, 10 aa, Homo Sapiens
TLDKPSVVSL

SEQ ID NO: 156275 - protein, 10 aa, Homo Sapiens
TVDADTVTEL

SEQ ID NO: 156276 - protein, 10 aa, Homo Sapiens
TVDDPYATFV

SEQ ID NO: 156277 - protein, 10 aa, Homo Sapiens
VAAEPPPGQL

SEQ ID NO: 156278 - protein, 10 aa, Homo Sapiens
VADDIMDSSL

SEQ ID NO: 156279 - protein, 10 aa, Homo Sapiens
VADDQGQHPL

SEQ ID NO: 156280 - protein, 10 aa, Homo Sapiens
VADDRFTKSI

SEQ ID NO: 156281 - protein, 10 aa, Homo Sapiens
VADDYIHTAA

SEQ ID NO: 156282 - protein, 10 aa, Homo Sapiens
VADGAGAVII

SEQ ID NO: 156283 - protein, 10 aa, Homo Sapiens
VADGIFKAEL

SEQ ID NO: 156284 - protein, 10 aa, Homo Sapiens
VADGSLINQL

SEQ ID NO: 156285 - protein, 10 aa, Homo Sapiens
VADIDGQYAM

SEQ ID NO: 156286 - protein, 10 aa, Homo Sapiens
VADKTGSITI

SEQ ID NO: 156287 - protein, 10 aa, Homo Sapiens
VADNRKVQEL

SEQ ID NO: 156288 - protein, 10 aa, Homo Sapiens
VADPDNPLVL

SEQ ID NO: 156289 - protein, 10 aa, Homo Sapiens
VADPVYRTFL

SEQ ID NO: 156290 - protein, 10 aa, Homo Sapiens
VADPYVVIMS

SEQ ID NO: 156291 - protein, 10 aa, Homo Sapiens
VADSDRQLAL

SEQ ID NO: 156292 - protein, 10 aa, Homo Sapiens
VADSPAEVAL

SEQ ID NO: 156293 - protein, 10 aa, Homo Sapiens
VADTPENLRL

SEQ ID NO: 156294 - protein, 10 aa, Homo Sapiens
VADWGQKVSF

SEQ ID NO: 156295 - protein, 10 aa, Homo Sapiens
VADYCENNYI

SEQ ID NO: 156296 - protein, 10 aa, Homo Sapiens
VAEEPAGTSL

SEQ ID NO: 156297 - protein, 10 aa, Homo Sapiens
VIDFDENTAL

SEQ ID NO: 156298 - protein, 10 aa, Homo Sapiens
VIDFSHGLAL

SEQ ID NO: 156299 - protein, 10 aa, Homo Sapiens
VIDIPGADTL

SEQ ID NO: 156300 - protein, 10 aa, Homo Sapiens
VIDPATATSV

SEQ ID NO: 156301 - protein, 10 aa, Homo Sapiens
VIDPESGNTL

SEQ ID NO: 156302 - protein, 10 aa, Homo Sapiens
VIDSGDGVTH

SEQ ID NO: 156303 - protein, 10 aa, Homo Sapiens
VIEDFPAKEL

SEQ ID NO: 156304 - protein, 10 aa, Homo Sapiens
VLDENKNTAL

SEQ ID NO: 156305 - protein, 10 aa, Homo Sapiens
VSDDPQVLAV

SEQ ID NO: 156306 - protein, 10 aa, Homo Sapiens
VSDDSLGSLL

SEQ ID NO: 156307 - protein, 10 aa, Homo Sapiens
VSDGAAAILL

SEQ ID NO: 156308 - protein, 10 aa, Homo Sapiens
VSDIVGPDGL

SEQ ID NO: 156309 - protein, 10 aa, Homo Sapiens
VSDMGVIHPL

SEQ ID NO: 156310 - protein, 10 aa, Homo Sapiens
VSDPESTVAV

SEQ ID NO: 156311 - protein, 10 aa, Homo Sapiens
VSDPNLIHVL

SEQ ID NO: 156312 - protein, 10 aa, Homo Sapiens
VSDPSHCNVL

SEQ ID NO: 156313 - protein, 10 aa, Homo Sapiens
VTDEFLSDFL

SEQ ID NO: 156314 - protein, 10 aa, Homo Sapiens
VTDEPVYIDL

SEQ ID NO: 156315 - protein, 10 aa, Homo Sapiens
VTDETSGCSL

SEQ ID NO: 156316 - protein, 10 aa, Homo Sapiens
VTDGLPATAL

SEQ ID NO: 156317 - protein, 10 aa, Homo Sapiens
VTDSAAFNAL

SEQ ID NO: 156318 - protein, 10 aa, Homo Sapiens
VTVSSDHEVI

SEQ ID NO: 156319 - protein, 10 aa, Homo Sapiens
VVDDSNEHML

SEQ ID NO: 156320 - protein, 10 aa, Homo Sapiens
VVDNPQKFAL

SEQ ID NO: 156321 - protein, 10 aa, Homo Sapiens
VVDSPGQEVL

SEQ ID NO: 156322 - protein, 10 aa, Homo Sapiens
VVPPFLQPEV

SEQ ID NO: 156323 - protein, 10 aa, Homo Sapiens
WADGLIHTSL

SEQ ID NO: 156324 - protein, 10 aa, Homo Sapiens
WLDPNETNEI

SEQ ID NO: 156325 - protein, 10 aa, Homo Sapiens
YADASGRNTL

SEQ ID NO: 156326 - protein, 10 aa, Homo Sapiens
YADDNSLLFM

SEQ ID NO: 156327 - protein, 10 aa, Homo Sapiens
YADPGAEVKI

SEQ ID NO: 156328 - protein, 10 aa, Homo Sapiens
YADPVSAQHA

SEQ ID NO: 156329 - protein, 10 aa, Homo Sapiens
YADQHSVQVF

SEQ ID NO: 156330 - protein, 10 aa, Homo Sapiens
YCEPPTGVSL

SEQ ID NO: 156331 - protein, 10 aa, Homo Sapiens
YGDDPTAQSL

SEQ ID NO: 156332 - protein, 10 aa, Homo Sapiens
YIDPYKLLPL

SEQ ID NO: 156333 - protein, 10 aa, Homo Sapiens
YIEQGNTKAL

SEQ ID NO: 156334 - protein, 10 aa, Homo Sapiens
YLDEEFHQSL

SEQ ID NO: 156335 - protein, 10 aa, Homo Sapiens
YLDGHLITTV

SEQ ID NO: 156336 - protein, 10 aa, Homo Sapiens
YQDPSFHLSL

SEQ ID NO: 156337 - protein, 10 aa, Homo Sapiens
YSDTELQQCL

SEQ ID NO: 156338 - protein, 10 aa, Homo Sapiens
YTDDESMKSL

SEQ ID NO: 156339 - protein, 10 aa, Homo Sapiens
YTDTSNHSSL

SEQ ID NO: 156340 - protein, 10 aa, Homo Sapiens
YVDAGTPMYL

SEQ ID NO: 156341 - protein, 10 aa, Homo Sapiens
YVDDPPRIVL

SEQ ID NO: 156342 - protein, 10 aa, Homo Sapiens
YVDEAGTVKL

SEQ ID NO: 156343 - protein, 10 aa, Homo Sapiens
YVDEASKKEI

SEQ ID NO: 156344 - protein, 10 aa, Homo Sapiens
YVDGPASTAF

SEQ ID NO: 156345 - protein, 10 aa, Homo Sapiens
YVDPYELASL

SEQ ID NO: 156346 - protein, 10 aa, Homo Sapiens
YVDQNIHEQL

SEQ ID NO: 156347 - protein, 11 aa, Homo Sapiens
AADAEPLEIIL

SEQ ID NO: 156348 - protein, 11 aa, Homo Sapiens
AADALGKLISI

SEQ ID NO: 156349 - protein, 11 aa, Homo Sapiens
AADDIMDPTSL

SEQ ID NO: 156350 - protein, 11 aa, Homo Sapiens
AADDPLVHESL

SEQ ID NO: 156351 - protein, 11 aa, Homo Sapiens
AADFSGFGSTL

SEQ ID NO: 156352 - protein, 11 aa, Homo Sapiens
AADGGLRASVT

SEQ ID NO: 156353 - protein, 11 aa, Homo Sapiens
AADGSVKLWSL

SEQ ID NO: 156354 - protein, 11 aa, Homo Sapiens
AADIENRVLEL

SEQ ID NO: 156355 - protein, 11 aa, Homo Sapiens
AADLDAVPMSL

SEQ ID NO: 156356 - protein, 11 aa, Homo Sapiens
AADMLGSYGSL

SEQ ID NO: 156357 - protein, 11 aa, Homo Sapiens
AADVAQSTHVL

SEQ ID NO: 156358 - protein, 11 aa, Homo Sapiens
AAENPGKYNIL

SEQ ID NO: 156359 - protein, 11 aa, Homo Sapiens
ADPPWDIHMEL

SEQ ID NO: 156360 - protein, 11 aa, Homo Sapiens
ASDLVSKSSSL

SEQ ID NO: 156361 - protein, 11 aa, Homo Sapiens
AVDKANLEIMT

SEQ ID NO: 156362 - protein, 11 aa, Homo Sapiens
AVDNQPRDIGL

SEQ ID NO: 156363 - protein, 11 aa, Homo Sapiens
AVDTSSEITTK

SEQ ID NO: 156364 - protein, 11 aa, Homo Sapiens
FADDGVKYLEL

SEQ ID NO: 156365 - protein, 11 aa, Homo Sapiens
FADDPCSSVKR

SEQ ID NO: 156366 - protein, 11 aa, Homo Sapiens
FADDTYTESYI

SEQ ID NO: 156367 - protein, 11 aa, Homo Sapiens
FADFVEGSSHL

SEQ ID NO: 156368 - protein, 11 aa, Homo Sapiens
FADGERKVEHL

SEQ ID NO: 156369 - protein, 11 aa, Homo Sapiens
FADHGQDSSSL

SEQ ID NO: 156370 - protein, 11 aa, Homo Sapiens
FADKETLIQFL

SEQ ID NO: 156371 - protein, 11 aa, Homo Sapiens
FADLGDLSSGL

SEQ ID NO: 156372 - protein, 11 aa, Homo Sapiens
FADLSQKSPEL

SEQ ID NO: 156373 - protein, 11 aa, Homo Sapiens
FADNPGPMVVF

SEQ ID NO: 156374 - protein, 11 aa, Homo Sapiens
FADPAHGGSWL

SEQ ID NO: 156375 - protein, 11 aa, Homo Sapiens
FADQNSVPRAL

SEQ ID NO: 156376 - protein, 11 aa, Homo Sapiens
FADVLPEAAAL

SEQ ID NO: 156377 - protein, 11 aa, Homo Sapiens
FAEDITTGQVL

SEQ ID NO: 156378 - protein, 11 aa, Homo Sapiens
FAEDVGSNKGA

SEQ ID NO: 156379 - protein, 11 aa, Homo Sapiens
FAEISSNTSQL

SEQ ID NO: 156380 - protein, 11 aa, Homo Sapiens
FAYDGKDYIAL

SEQ ID NO: 156381 - protein, 11 aa, Homo Sapiens
FAYDGKDYLTL

SEQ ID NO: 156382 - protein, 11 aa, Homo Sapiens
FAYDPSNYEYL

SEQ ID NO: 156383 - protein, 11 aa, Homo Sapiens
FGDEGAVIEVL

SEQ ID NO: 156384 - protein, 11 aa, Homo Sapiens
FGDESNKPILL

SEQ ID NO: 156385 - protein, 11 aa, Homo Sapiens
FIDDANYSVGL

SEQ ID NO: 156386 - protein, 11 aa, Homo Sapiens
FIDDLADLSCL

SEQ ID NO: 156387 - protein, 11 aa, Homo Sapiens
FIDLDSHAEAL

SEQ ID NO: 156388 - protein, 11 aa, Homo Sapiens
FLDNPGILSEL

SEQ ID NO: 156389 - protein, 11 aa, Homo Sapiens
FLDVGEYNSAL

SEQ ID NO: 156390 - protein, 11 aa, Homo Sapiens
FQDPSAVYSEL

SEQ ID NO: 156391 - protein, 11 aa, Homo Sapiens
FSDDAFNTTFI

SEQ ID NO: 156392 - protein, 11 aa, Homo Sapiens
FSDDPNVTKTL

SEQ ID NO: 156393 - protein, 11 aa, Homo Sapiens
FTDLSRLPLAL

SEQ ID NO: 156394 - protein, 11 aa, Homo Sapiens
FVDDSGRYLAI

SEQ ID NO: 156395 - protein, 11 aa, Homo Sapiens
FVDLEQFNQQL

SEQ ID NO: 156396 - protein, 11 aa, Homo Sapiens
FVDTADRLASL

SEQ ID NO: 156397 - protein, 11 aa, Homo Sapiens
FVEDASTASAL

SEQ ID NO: 156398 - protein, 11 aa, Homo Sapiens
FVEEPSKKGAL

SEQ ID NO: 156399 - protein, 11 aa, Homo Sapiens
GAEDPETQVVL

SEQ ID NO: 156400 - protein, 11 aa, Homo Sapiens
GAFLSRPINTI

SEQ ID NO: 156401 - protein, 11 aa, Homo Sapiens
HADTSVKPQAL

SEQ ID NO: 156402 - protein, 11 aa, Homo Sapiens
HADTVGIDAVL

SEQ ID NO: 156403 - protein, 11 aa, Homo Sapiens
HLDPAGTHSTL

SEQ ID NO: 156404 - protein, 11 aa, Homo Sapiens
HVDGSSKPAVL

SEQ ID NO: 156405 - protein, 11 aa, Homo Sapiens
IADDADPRVAL

SEQ ID NO: 156406 - protein, 11 aa, Homo Sapiens
IADLSHEAILL

SEQ ID NO: 156407 - protein, 11 aa, Homo Sapiens
IADLSNIINKL

SEQ ID NO: 156408 - protein, 11 aa, Homo Sapiens
IADSNQNMQSL

SEQ ID NO: 156409 - protein, 11 aa, Homo Sapiens
IIDDPNLVVKI

SEQ ID NO: 156410 - protein, 11 aa, Homo Sapiens
IIDLEQTATHL

SEQ ID NO: 156411 - protein, 11 aa, Homo Sapiens
IMDDPAGNSYL

SEQ ID NO: 156412 - protein, 11 aa, Homo Sapiens
IQDLIDDKDAL

SEQ ID NO: 156413 - protein, 11 aa, Homo Sapiens
IQDQLSLSEAL

SEQ ID NO: 156414 - protein, 11 aa, Homo Sapiens
ISDDSRTASQL

SEQ ID NO: 156415 - protein, 11 aa, Homo Sapiens
ISDDTTHPISY

SEQ ID NO: 156416 - protein, 11 aa, Homo Sapiens
ISDLDRQIEQL

SEQ ID NO: 156417 - protein, 11 aa, Homo Sapiens
IVDGGINPDSL

SEQ ID NO: 156418 - protein, 11 aa, Homo Sapiens
IVDLARYVQEL

SEQ ID NO: 156419 - protein, 11 aa, Homo Sapiens
IVDLGDHREVL

SEQ ID NO: 156420 - protein, 11 aa, Homo Sapiens
IVDPTGEEEHL

SEQ ID NO: 156421 - protein, 11 aa, Homo Sapiens
IVDPVEPHGEM

SEQ ID NO: 156422 - protein, 11 aa, Homo Sapiens
KADGQGSTTML

SEQ ID NO: 156423 - protein, 11 aa, Homo Sapiens
KADPAAASHPL

SEQ ID NO: 156424 - protein, 11 aa, Homo Sapiens
KADPQEAINCL

SEQ ID NO: 156425 - protein, 11 aa, Homo Sapiens
KSDQTNILSAL

SEQ ID NO: 156426 - protein, 11 aa, Homo Sapiens
KTDLDDDITAL

SEQ ID NO: 156427 - protein, 11 aa, Homo Sapiens
KVDSPTVNTTL

SEQ ID NO: 156428 - protein, 11 aa, Homo Sapiens
KVDSPTVTTTL

SEQ ID NO: 156429 - protein, 11 aa, Homo Sapiens
KVDVASVIVTK

SEQ ID NO: 156430 - protein, 11 aa, Homo Sapiens
LADLNSVERSL

SEQ ID NO: 156431 - protein, 11 aa, Homo Sapiens
LADWVSGKISF

SEQ ID NO: 156432 - protein, 11 aa, Homo Sapiens
LAEMPDSAAAL

SEQ ID NO: 156433 - protein, 11 aa, Homo Sapiens
LLDEPTNHLDL

SEQ ID NO: 156434 - protein, 11 aa, Homo Sapiens
LSDEHAGVISV

SEQ ID NO: 156435 - protein, 11 aa, Homo Sapiens
LSDYSDIVTTL

SEQ ID NO: 156436 - protein, 11 aa, Homo Sapiens
LVDAGVPMRAL

SEQ ID NO: 156437 - protein, 11 aa, Homo Sapiens
MADKPGNTVNF

SEQ ID NO: 156438 - protein, 11 aa, Homo Sapiens
MAPSETQFSHL

SEQ ID NO: 156439 - protein, 11 aa, Homo Sapiens
NADDMDRIMTL

SEQ ID NO: 156440 - protein, 11 aa, Homo Sapiens
NLDVPHSYSVL

SEQ ID NO: 156441 - protein, 11 aa, Homo Sapiens
NSDGYPDSLAL

SEQ ID NO: 156442 - protein, 11 aa, Homo Sapiens
NTDQTTASSSL

SEQ ID NO: 156443 - protein, 11 aa, Homo Sapiens
NVDSSGNKSVL

SEQ ID NO: 156444 - protein, 11 aa, Homo Sapiens
QADNPMESSIL

SEQ ID NO: 156445 - protein, 11 aa, Homo Sapiens
RADSTYGSSSL

SEQ ID NO: 156446 - protein, 11 aa, Homo Sapiens
RAEDNADTLAL

SEQ ID NO: 156447 - protein, 11 aa, Homo Sapiens
RQILKNPDDPD

SEQ ID NO: 156448 - protein, 11 aa, Homo Sapiens
SADDIAGKFQF

SEQ ID NO: 156449 - protein, 11 aa, Homo Sapiens
SADGTIKLWAL

SEQ ID NO: 156450 - protein, 11 aa, Homo Sapiens
SADLTCRTSDL

SEQ ID NO: 156451 - protein, 11 aa, Homo Sapiens
SADTILIGHSL

SEQ ID NO: 156452 - protein, 11 aa, Homo Sapiens
SADVNGKIIVW

SEQ ID NO: 156453 - protein, 11 aa, Homo Sapiens
SAEDLEKALEL

SEQ ID NO: 156454 - protein, 11 aa, Homo Sapiens
SAEYSTKNNAL

SEQ ID NO: 156455 - protein, 11 aa, Homo Sapiens
SFGAGGGFGSR

SEQ ID NO: 156456 - protein, 11 aa, Homo Sapiens
SFQSPVKISEI

SEQ ID NO: 156457 - protein, 11 aa, Homo Sapiens
SIDSPKAITSL

SEQ ID NO: 156458 - protein, 11 aa, Homo Sapiens
SIDVSLPLNTL

SEQ ID NO: 156459 - protein, 11 aa, Homo Sapiens
SQDLLDLMHTL

SEQ ID NO: 156460 - protein, 11 aa, Homo Sapiens
TADDKKLQSSL

SEQ ID NO: 156461 - protein, 11 aa, Homo Sapiens
TADENPDKSTL

SEQ ID NO: 156462 - protein, 11 aa, Homo Sapiens
TADLPNELIEL

SEQ ID NO: 156463 - protein, 11 aa, Homo Sapiens
TADQVDLTSAL

SEQ ID NO: 156464 - protein, 11 aa, Homo Sapiens
TANGGLALASI

SEQ ID NO: 156465 - protein, 11 aa, Homo Sapiens
TIDQSELSSQL

SEQ ID NO: 156466 - protein, 11 aa, Homo Sapiens
TLDGGDIINAL

SEQ ID NO: 156467 - protein, 11 aa, Homo Sapiens
TSDVQDRLSAL

SEQ ID NO: 156468 - protein, 11 aa, Homo Sapiens
TVDLGEPLHSL

SEQ ID NO: 156469 - protein, 11 aa, Homo Sapiens
VADAGAATREL

SEQ ID NO: 156470 - protein, 11 aa, Homo Sapiens
VADIQDRIQAL

SEQ ID NO: 156471 - protein, 11 aa, Homo Sapiens
VADPPRDSKGL

SEQ ID NO: 156472 - protein, 11 aa, Homo Sapiens
VADSPRDTASL

SEQ ID NO: 156473 - protein, 11 aa, Homo Sapiens
VIDESTTASIL

SEQ ID NO: 156474 - protein, 11 aa, Homo Sapiens
VIDFTGHALAL

SEQ ID NO: 156475 - protein, 11 aa, Homo Sapiens
VIWTSSDHQVL

SEQ ID NO: 156476 - protein, 11 aa, Homo Sapiens
VLDKDLQKLPW

SEQ ID NO: 156477 - protein, 11 aa, Homo Sapiens
VLDQAGGLIAF

SEQ ID NO: 156478 - protein, 11 aa, Homo Sapiens
VQDILEQNEAL

SEQ ID NO: 156479 - protein, 11 aa, Homo Sapiens
VSDGENVIISH

SEQ ID NO: 156480 - protein, 11 aa, Homo Sapiens
VSDGHLQDESL

SEQ ID NO: 156481 - protein, 11 aa, Homo Sapiens
VTEGVSETSFL

SEQ ID NO: 156482 - protein, 11 aa, Homo Sapiens
VVDPVTSEHEL

SEQ ID NO: 156483 - protein, 11 aa, Homo Sapiens
YADGEAKVEQL

SEQ ID NO: 156484 - protein, 11 aa, Homo Sapiens
YADIDAAWQAL

SEQ ID NO: 156485 - protein, 11 aa, Homo Sapiens
YADIGGLDNQI

SEQ ID NO: 156486 - protein, 11 aa, Homo Sapiens
YADPNFVRTFL

SEQ ID NO: 156487 - protein, 11 aa, Homo Sapiens
YADVQKDGVGM

SEQ ID NO: 156488 - protein, 11 aa, Homo Sapiens
YAYDGKDYIAL

SEQ ID NO: 156489 - protein, 11 aa, Homo Sapiens
YGDLGGPIITT

SEQ ID NO: 156490 - protein, 11 aa, Homo Sapiens
YIDFRDGAGLL

SEQ ID NO: 156491 - protein, 11 aa, Homo Sapiens
YIDIADRSQVL

SEQ ID NO: 156492 - protein, 11 aa, Homo Sapiens
YLDCGDLSNAL

SEQ ID NO: 156493 - protein, 11 aa, Homo Sapiens
YLDLDSKVRTL

SEQ ID NO: 156494 - protein, 11 aa, Homo Sapiens
YSDELQSVISH

SEQ ID NO: 156495 - protein, 11 aa, Homo Sapiens
YSDFDLLNNSL

SEQ ID NO: 156496 - protein, 11 aa, Homo Sapiens
YSDPGLAGVSL

SEQ ID NO: 156497 - protein, 11 aa, Homo Sapiens
YTDVGEKGSQL

SEQ ID NO: 156498 - protein, 11 aa, Homo Sapiens
YVDDIEKGHTL

SEQ ID NO: 156499 - protein, 11 aa, Homo Sapiens
YVDLLKLEDVL

SEQ ID NO: 156500 - protein, 8 aa, Homo Sapiens
AAAVGAVF

SEQ ID NO: 156501 - protein, 8 aa, Homo Sapiens
AAGKPRVL

SEQ ID NO: 156502 - protein, 8 aa, Homo Sapiens
AASVRPVL

SEQ ID NO: 156503 - protein, 8 aa, Homo Sapiens
ASYVSPVL

SEQ ID NO: 156504 - protein, 8 aa, Homo Sapiens
FAGAAREV

SEQ ID NO: 156505 - protein, 8 aa, Homo Sapiens
FAYTGTEM

SEQ ID NO: 156506 - protein, 8 aa, Homo Sapiens
FSPVGSVL

SEQ ID NO: 156507 - protein, 8 aa, Homo Sapiens
FTYVAPSV

SEQ ID NO: 156508 - protein, 8 aa, Homo Sapiens
GKAPGTPH

SEQ ID NO: 156509 - protein, 8 aa, Homo Sapiens
HAGPIIVH

SEQ ID NO: 156510 - protein, 8 aa, Homo Sapiens
HTGPITCL

SEQ ID NO: 156511 - protein, 8 aa, Homo Sapiens
IQTAVTSY

SEQ ID NO: 156512 - protein, 8 aa, Homo Sapiens
LAFVSPSL

SEQ ID NO: 156513 - protein, 8 aa, Homo Sapiens
LAGPVQEV

SEQ ID NO: 156514 - protein, 8 aa, Homo Sapiens
LEALQPAL

SEQ ID NO: 156515 - protein, 8 aa, Homo Sapiens
LSKVSPSF

SEQ ID NO: 156516 - protein, 8 aa, Homo Sapiens
MAYNAPSL

SEQ ID NO: 156517 - protein, 8 aa, Homo Sapiens
MTGPISTH

SEQ ID NO: 156518 - protein, 8 aa, Homo Sapiens
NIDVSHPI

SEQ ID NO: 156519 - protein, 8 aa, Homo Sapiens
QALESHPL

SEQ ID NO: 156520 - protein, 8 aa, Homo Sapiens
SAGEPRVL

SEQ ID NO: 156521 - protein, 8 aa, Homo Sapiens
SAGPMRLY

SEQ ID NO: 156522 - protein, 8 aa, Homo Sapiens
SPVKPSMV

SEQ ID NO: 156523 - protein, 8 aa, Homo Sapiens
TVGPLVVY

SEQ ID NO: 156524 - protein, 8 aa, Homo Sapiens
VAKVGVSM

SEQ ID NO: 156525 - protein, 8 aa, Homo Sapiens
VAMNPVEH

SEQ ID NO: 156526 - protein, 8 aa, Homo Sapiens
VAQLAQEI

SEQ ID NO: 156527 - protein, 8 aa, Homo Sapiens
VAYEAPSL

SEQ ID NO: 156528 - protein, 8 aa, Homo Sapiens
VIHNLPVL

SEQ ID NO: 156529 - protein, 8 aa, Homo Sapiens
VIRDAVTY

SEQ ID NO: 156530 - protein, 8 aa, Homo Sapiens
VSPTGTAV

SEQ ID NO: 156531 - protein, 8 aa, Homo Sapiens
VSQVGKEL

SEQ ID NO: 156532 - protein, 8 aa, Homo Sapiens
VTHTVPIY

SEQ ID NO: 156533 - protein, 8 aa, Homo Sapiens
VVGPSSVL

SEQ ID NO: 156534 - protein, 8 aa, Homo Sapiens
YAAAAGVL

SEQ ID NO: 156535 - protein, 8 aa, Homo Sapiens
YAAFVQTH

SEQ ID NO: 156536 - protein, 8 aa, Homo Sapiens
YSGHYIAH

SEQ ID NO: 156537 - protein, 9 aa, Homo Sapiens
AAAAAAAAI

SEQ ID NO: 156538 - protein, 9 aa, Homo Sapiens
AAAAAAATM

SEQ ID NO: 156539 - protein, 9 aa, Homo Sapiens
AAAAAQSVY

SEQ ID NO: 156540 - protein, 9 aa, Homo Sapiens
AAAAGLAVY

SEQ ID NO: 156541 - protein, 9 aa, Homo Sapiens
AAAALPTLY

SEQ ID NO: 156542 - protein, 9 aa, Homo Sapiens
AAAAPRAVA

SEQ ID NO: 156543 - protein, 9 aa, Homo Sapiens
AAAAVGGAL

SEQ ID NO: 156544 - protein, 9 aa, Homo Sapiens
AAAAVGLAL

SEQ ID NO: 156545 - protein, 9 aa, Homo Sapiens
AAADHHSLY

SEQ ID NO: 156546 - protein, 9 aa, Homo Sapiens
AAADITSSL

SEQ ID NO: 156547 - protein, 9 aa, Homo Sapiens
AAADPKVAF

SEQ ID NO: 156548 - protein, 9 aa, Homo Sapiens
AAAEIYEEF

SEQ ID NO: 156549 - protein, 9 aa, Homo Sapiens
AAAEVAGQF

SEQ ID NO: 156550 - protein, 9 aa, Homo Sapiens
AAAEVLQVY

SEQ ID NO: 156551 - protein, 9 aa, Homo Sapiens
AAAGGLHEF

SEQ ID NO: 156552 - protein, 9 aa, Homo Sapiens
AAAGPGAAL

SEQ ID NO: 156553 - protein, 9 aa, Homo Sapiens
AAAGPGEVL

SEQ ID NO: 156554 - protein, 9 aa, Homo Sapiens
AAAGVFALL

SEQ ID NO: 156555 - protein, 9 aa, Homo Sapiens
AAAHCAHVF

SEQ ID NO: 156556 - protein, 9 aa, Homo Sapiens
AAAHTHPVY

SEQ ID NO: 156557 - protein, 9 aa, Homo Sapiens
AAAKIQASF

SEQ ID NO: 156558 - protein, 9 aa, Homo Sapiens
AAALPSNSF

SEQ ID NO: 156559 - protein, 9 aa, Homo Sapiens
AAANAIRVY

SEQ ID NO: 156560 - protein, 9 aa, Homo Sapiens
AAANPTLAF

SEQ ID NO: 156561 - protein, 9 aa, Homo Sapiens
AAAPAGTTF

SEQ ID NO: 156562 - protein, 9 aa, Homo Sapiens
AAAPAPASV

SEQ ID NO: 156563 - protein, 9 aa, Homo Sapiens
AAAPASGEM

SEQ ID NO: 156564 - protein, 9 aa, Homo Sapiens
AAAPIISSV

SEQ ID NO: 156565 - protein, 9 aa, Homo Sapiens
AAAPPAKEI

SEQ ID NO: 156566 - protein, 9 aa, Homo Sapiens
AAAPPALCY

SEQ ID NO: 156567 - protein, 9 aa, Homo Sapiens
AAARPKSAF

SEQ ID NO: 156568 - protein, 9 aa, Homo Sapiens
AAASAFTSL

SEQ ID NO: 156569 - protein, 9 aa, Homo Sapiens
AAASIANIV

SEQ ID NO: 156570 - protein, 9 aa, Homo Sapiens
AAASKLGEF

SEQ ID NO: 156571 - protein, 9 aa, Homo Sapiens
AAATGGSVL

SEQ ID NO: 156572 - protein, 9 aa, Homo Sapiens
AAATGLHPA

SEQ ID NO: 156573 - protein, 9 aa, Homo Sapiens
AAATRTTSF

SEQ ID NO: 156574 - protein, 9 aa, Homo Sapiens
AAATYILEA

SEQ ID NO: 156575 - protein, 9 aa, Homo Sapiens
AAAVPRAAF

SEQ ID NO: 156576 - protein, 9 aa, Homo Sapiens
AAAVPTRSY

SEQ ID NO: 156577 - protein, 9 aa, Homo Sapiens
AACDLVQRF

SEQ ID NO: 156578 - protein, 9 aa, Homo Sapiens
AAFADALEF

SEQ ID NO: 156579 - protein, 9 aa, Homo Sapiens
AAFAGGTSL

SEQ ID NO: 156580 - protein, 9 aa, Homo Sapiens
AAFAYTVKY

SEQ ID NO: 156581 - protein, 9 aa, Homo Sapiens
AAFCKLIVY

SEQ ID NO: 156582 - protein, 9 aa, Homo Sapiens
AAFDFPTSF

SEQ ID NO: 156583 - protein, 9 aa, Homo Sapiens
AAFDHICTF

SEQ ID NO: 156584 - protein, 9 aa, Homo Sapiens
AAFFTGQIF

SEQ ID NO: 156585 - protein, 9 aa, Homo Sapiens
AAFPGASLY

SEQ ID NO: 156586 - protein, 9 aa, Homo Sapiens
AAFPIAVVA

SEQ ID NO: 156587 - protein, 9 aa, Homo Sapiens
AAFPLPVVV

SEQ ID NO: 156588 - protein, 9 aa, Homo Sapiens
AAFPMASSF

SEQ ID NO: 156589 - protein, 9 aa, Homo Sapiens
AAFPYGGVL

SEQ ID NO: 156590 - protein, 9 aa, Homo Sapiens
AAGEPGTSM

SEQ ID NO: 156591 - protein, 9 aa, Homo Sapiens
AAGPTGMFF

SEQ ID NO: 156592 - protein, 9 aa, Homo Sapiens
AAGPVGMAA

SEQ ID NO: 156593 - protein, 9 aa, Homo Sapiens
AAHLPTQPH

SEQ ID NO: 156594 - protein, 9 aa, Homo Sapiens
AAHTVTAAY

SEQ ID NO: 156595 - protein, 9 aa, Homo Sapiens
AAHVAGAAY

SEQ ID NO: 156596 - protein, 9 aa, Homo Sapiens
AAIEASQSL

SEQ ID NO: 156597 - protein, 9 aa, Homo Sapiens
AAIEFISKM

SEQ ID NO: 156598 - protein, 9 aa, Homo Sapiens
AAIHCGHTF

SEQ ID NO: 156599 - protein, 9 aa, Homo Sapiens
AAIKPGTPL

SEQ ID NO: 156600 - protein, 9 aa, Homo Sapiens
AAINFQPKM

SEQ ID NO: 156601 - protein, 9 aa, Homo Sapiens
AAISHGRVF

SEQ ID NO: 156602 - protein, 9 aa, Homo Sapiens
AAITIQSSY

SEQ ID NO: 156603 - protein, 9 aa, Homo Sapiens
AAIWQYESL

SEQ ID NO: 156604 - protein, 9 aa, Homo Sapiens
AAIYHVLHF

SEQ ID NO: 156605 - protein, 9 aa, Homo Sapiens
AAKAAGVSF

SEQ ID NO: 156606 - protein, 9 aa, Homo Sapiens
AAKAALEEF

SEQ ID NO: 156607 - protein, 9 aa, Homo Sapiens
AAKAVANTM

SEQ ID NO: 156608 - protein, 9 aa, Homo Sapiens
AAKCALAYF

SEQ ID NO: 156609 - protein, 9 aa, Homo Sapiens
AAKDHTVVL

SEQ ID NO: 156610 - protein, 9 aa, Homo Sapiens
AAKDKLSEL

SEQ ID NO: 156611 - protein, 9 aa, Homo Sapiens
AAKDKLTEL

SEQ ID NO: 156612 - protein, 9 aa, Homo Sapiens
AAKDPSPSV

SEQ ID NO: 156613 - protein, 9 aa, Homo Sapiens
AAKDYNQKL

SEQ ID NO: 156614 - protein, 9 aa, Homo Sapiens
AAKFKTPEL

SEQ ID NO: 156615 - protein, 9 aa, Homo Sapiens
AAKPPPLSA

SEQ ID NO: 156616 - protein, 9 aa, Homo Sapiens
AAKSFSHSF

SEQ ID NO: 156617 - protein, 9 aa, Homo Sapiens
AAKSKIAHL

SEQ ID NO: 156618 - protein, 9 aa, Homo Sapiens
AAKSPSAQL

SEQ ID NO: 156619 - protein, 9 aa, Homo Sapiens
AAMDYHWVF

SEQ ID NO: 156620 - protein, 9 aa, Homo Sapiens
AAMLDTVVF

SEQ ID NO: 156621 - protein, 9 aa, Homo Sapiens
AAMLKIAEM

SEQ ID NO: 156622 - protein, 9 aa, Homo Sapiens
AAMPRPVSY

SEQ ID NO: 156623 - protein, 9 aa, Homo Sapiens
AAMPVAQHL

SEQ ID NO: 156624 - protein, 9 aa, Homo Sapiens
AANPHSFVF

SEQ ID NO: 156625 - protein, 9 aa, Homo Sapiens
AAPAYSRAL

SEQ ID NO: 156626 - protein, 9 aa, Homo Sapiens
AAPDGTRNL

SEQ ID NO: 156627 - protein, 9 aa, Homo Sapiens
AAPEGAGAL

SEQ ID NO: 156628 - protein, 9 aa, Homo Sapiens
AAPTAQKSL

SEQ ID NO: 156629 - protein, 9 aa, Homo Sapiens
AAPTSAAAL

SEQ ID NO: 156630 - protein, 9 aa, Homo Sapiens
AAPVATGAV

SEQ ID NO: 156631 - protein, 9 aa, Homo Sapiens
AAPVPTTTL

SEQ ID NO: 156632 - protein, 9 aa, Homo Sapiens
AAQMPTVHY

SEQ ID NO: 156633 - protein, 9 aa, Homo Sapiens
AAQSFYQTY

SEQ ID NO: 156634 - protein, 9 aa, Homo Sapiens
AAQTVGNTY

SEQ ID NO: 156635 - protein, 9 aa, Homo Sapiens
AARAALRVY

SEQ ID NO: 156636 - protein, 9 aa, Homo Sapiens
AARDFLQTF

SEQ ID NO: 156637 - protein, 9 aa, Homo Sapiens
AARLVLENY

SEQ ID NO: 156638 - protein, 9 aa, Homo Sapiens
AARNVPVGF

SEQ ID NO: 156639 - protein, 9 aa, Homo Sapiens
AARPATSTL

SEQ ID NO: 156640 - protein, 9 aa, Homo Sapiens
AARSGPLAM

SEQ ID NO: 156641 - protein, 9 aa, Homo Sapiens
AARVIIEKY

SEQ ID NO: 156642 - protein, 9 aa, Homo Sapiens
AARVPGVEH

SEQ ID NO: 156643 - protein, 9 aa, Homo Sapiens
AARYPQITF

SEQ ID NO: 156644 - protein, 9 aa, Homo Sapiens
AASPIITLV

SEQ ID NO: 156645 - protein, 9 aa, Homo Sapiens
AASPVVAEY

SEQ ID NO: 156646 - protein, 9 aa, Homo Sapiens
AASPVVSSM

SEQ ID NO: 156647 - protein, 9 aa, Homo Sapiens
AASSIYSMY

SEQ ID NO: 156648 - protein, 9 aa, Homo Sapiens
AASTAIYVY

SEQ ID NO: 156649 - protein, 9 aa, Homo Sapiens
AATCNHTVM

SEQ ID NO: 156650 - protein, 9 aa, Homo Sapiens
AATDITSSL

SEQ ID NO: 156651 - protein, 9 aa, Homo Sapiens
AATGATPIA

SEQ ID NO: 156652 - protein, 9 aa, Homo Sapiens
AATGHTVVL

SEQ ID NO: 156653 - protein, 9 aa, Homo Sapiens
AAVAAAAYY

SEQ ID NO: 156654 - protein, 9 aa, Homo Sapiens
AAVAPGHPL

SEQ ID NO: 156655 - protein, 9 aa, Homo Sapiens
AAVDAGMAM

SEQ ID NO: 156656 - protein, 9 aa, Homo Sapiens
AAVDRTTEL

SEQ ID NO: 156657 - protein, 9 aa, Homo Sapiens
AAVEDLHHY

SEQ ID NO: 156658 - protein, 9 aa, Homo Sapiens
AAVELWQHF

SEQ ID NO: 156659 - protein, 9 aa, Homo Sapiens
AAVGHVLVV

SEQ ID NO: 156660 - protein, 9 aa, Homo Sapiens
AAVGTGSSY

SEQ ID NO: 156661 - protein, 9 aa, Homo Sapiens
AAVIIQTHF

SEQ ID NO: 156662 - protein, 9 aa, Homo Sapiens
AAVNHISQL

SEQ ID NO: 156663 - protein, 9 aa, Homo Sapiens
AAVPEVAVY

SEQ ID NO: 156664 - protein, 9 aa, Homo Sapiens
AAVSFISKF

SEQ ID NO: 156665 - protein, 9 aa, Homo Sapiens
AAYGYKITE

SEQ ID NO: 156666 - protein, 9 aa, Homo Sapiens
AAYLPKNTH

SEQ ID NO: 156667 - protein, 9 aa, Homo Sapiens
AAYPNSSLF

SEQ ID NO: 156668 - protein, 9 aa, Homo Sapiens
AAYYHPSYL

SEQ ID NO: 156669 - protein, 9 aa, Homo Sapiens
AFAAAAAAA

SEQ ID NO: 156670 - protein, 9 aa, Homo Sapiens
AGMPITEVF

SEQ ID NO: 156671 - protein, 9 aa, Homo Sapiens
AIAAAAAAA

SEQ ID NO: 156672 - protein, 9 aa, Homo Sapiens
AIDVILEGY

SEQ ID NO: 156673 - protein, 9 aa, Homo Sapiens
AIFRPGTSF

SEQ ID NO: 156674 - protein, 9 aa, Homo Sapiens
AIIADSSTF

SEQ ID NO: 156675 - protein, 9 aa, Homo Sapiens
AIIDILTHY

SEQ ID NO: 156676 - protein, 9 aa, Homo Sapiens
AIIDTVINY

SEQ ID NO: 156677 - protein, 9 aa, Homo Sapiens
AIIENLKYF

SEQ ID NO: 156678 - protein, 9 aa, Homo Sapiens
AIIERTASF

SEQ ID NO: 156679 - protein, 9 aa, Homo Sapiens
AIIHGLSSL

SEQ ID NO: 156680 - protein, 9 aa, Homo Sapiens
AIINNCQTF

SEQ ID NO: 156681 - protein, 9 aa, Homo Sapiens
AIITPQTCY

SEQ ID NO: 156682 - protein, 9 aa, Homo Sapiens
AIKLVTAVF

SEQ ID NO: 156683 - protein, 9 aa, Homo Sapiens
AIPAFISLL

SEQ ID NO: 156684 - protein, 9 aa, Homo Sapiens
AIRDGVIEA

SEQ ID NO: 156685 - protein, 9 aa, Homo Sapiens
AIYGGSASY

SEQ ID NO: 156686 - protein, 9 aa, Homo Sapiens
ALAGPAAAL

SEQ ID NO: 156687 - protein, 9 aa, Homo Sapiens
ALPEFTSIF

SEQ ID NO: 156688 - protein, 9 aa, Homo Sapiens
AMYPHIFYF

SEQ ID NO: 156689 - protein, 9 aa, Homo Sapiens
AQGPTPRYF

SEQ ID NO: 156690 - protein, 9 aa, Homo Sapiens
AQISWVTVF

SEQ ID NO: 156691 - protein, 9 aa, Homo Sapiens
AQKNHIPVF

SEQ ID NO: 156692 - protein, 9 aa, Homo Sapiens
AQVPFEQIL

SEQ ID NO: 156693 - protein, 9 aa, Homo Sapiens
ASAPPGPPA

SEQ ID NO: 156694 - protein, 9 aa, Homo Sapiens
ASKEPPLYY

SEQ ID NO: 156695 - protein, 9 aa, Homo Sapiens
ASPSSIRSL

SEQ ID NO: 156696 - protein, 9 aa, Homo Sapiens
ASSPLITVF

SEQ ID NO: 156697 - protein, 9 aa, Homo Sapiens
ASVPAALAS

SEQ ID NO: 156698 - protein, 9 aa, Homo Sapiens
ATAAAAAAY

SEQ ID NO: 156699 - protein, 9 aa, Homo Sapiens
AVAAVVPAM

SEQ ID NO: 156700 - protein, 9 aa, Homo Sapiens
AVAPPGCSH

SEQ ID NO: 156701 - protein, 9 aa, Homo Sapiens
AVHDITVAY

SEQ ID NO: 156702 - protein, 9 aa, Homo Sapiens
AVIAPKSSY

SEQ ID NO: 156703 - protein, 9 aa, Homo Sapiens
AVLASGATF

SEQ ID NO: 156704 - protein, 9 aa, Homo Sapiens
AVNALQSVY

SEQ ID NO: 156705 - protein, 9 aa, Homo Sapiens
AVRENIEEF

SEQ ID NO: 156706 - protein, 9 aa, Homo Sapiens
AVRIPGGPA

SEQ ID NO: 156707 - protein, 9 aa, Homo Sapiens
AVYEHPSIL

SEQ ID NO: 156708 - protein, 9 aa, Homo Sapiens
CAAAPGAHY

SEQ ID NO: 156709 - protein, 9 aa, Homo Sapiens
CAAPILDKV

SEQ ID NO: 156710 - protein, 9 aa, Homo Sapiens
CAGPAYSSY

SEQ ID NO: 156711 - protein, 9 aa, Homo Sapiens
CAIAQAESL

SEQ ID NO: 156712 - protein, 9 aa, Homo Sapiens
CSFPFKYTY

SEQ ID NO: 156713 - protein, 9 aa, Homo Sapiens
CSSPIVVKF

SEQ ID NO: 156714 - protein, 9 aa, Homo Sapiens
CTYGKPVTF

SEQ ID NO: 156715 - protein, 9 aa, Homo Sapiens
EAIIPGSVY

SEQ ID NO: 156716 - protein, 9 aa, Homo Sapiens
EGGQLASCF

SEQ ID NO: 156717 - protein, 9 aa, Homo Sapiens
EVKRPGESL

SEQ ID NO: 156718 - protein, 9 aa, Homo Sapiens
FAAASREVL

SEQ ID NO: 156719 - protein, 9 aa, Homo Sapiens
FAADIISVL

SEQ ID NO: 156720 - protein, 9 aa, Homo Sapiens
FAAHLRCTY

SEQ ID NO: 156721 - protein, 9 aa, Homo Sapiens
FAAIGSAVF

SEQ ID NO: 156722 - protein, 9 aa, Homo Sapiens
FAANVYEAF

SEQ ID NO: 156723 - protein, 9 aa, Homo Sapiens
FAATLEQVY

SEQ ID NO: 156724 - protein, 9 aa, Homo Sapiens
FAFDPSVNY

SEQ ID NO: 156725 - protein, 9 aa, Homo Sapiens
FAFEHSEEY

SEQ ID NO: 156726 - protein, 9 aa, Homo Sapiens
FAFLTGVGL

SEQ ID NO: 156727 - protein, 9 aa, Homo Sapiens
FAFVTDNTY

SEQ ID NO: 156728 - protein, 9 aa, Homo Sapiens
FAHLINVEF

SEQ ID NO: 156729 - protein, 9 aa, Homo Sapiens
FAHLPKSTF

SEQ ID NO: 156730 - protein, 9 aa, Homo Sapiens
FAHPPRVCH

SEQ ID NO: 156731 - protein, 9 aa, Homo Sapiens
FAIPLIEKL

SEQ ID NO: 156732 - protein, 9 aa, Homo Sapiens
FAIQRTTNF

SEQ ID NO: 156733 - protein, 9 aa, Homo Sapiens
FAKEVSHEM

SEQ ID NO: 156734 - protein, 9 aa, Homo Sapiens
FAKGTEITH

SEQ ID NO: 156735 - protein, 9 aa, Homo Sapiens
FAKPENIDL

SEQ ID NO: 156736 - protein, 9 aa, Homo Sapiens
FAKPFLASL

SEQ ID NO: 156737 - protein, 9 aa, Homo Sapiens
FAMEFVKYY

SEQ ID NO: 156738 - protein, 9 aa, Homo Sapiens
FANEPFADF

SEQ ID NO: 156739 - protein, 9 aa, Homo Sapiens
FANGHVNSV

SEQ ID NO: 156740 - protein, 9 aa, Homo Sapiens
FANLPNQVY

SEQ ID NO: 156741 - protein, 9 aa, Homo Sapiens
FAQDVGRMF

SEQ ID NO: 156742 - protein, 9 aa, Homo Sapiens
FAQEAISVL

SEQ ID NO: 156743 - protein, 9 aa, Homo Sapiens
FAQEALTVL

SEQ ID NO: 156744 - protein, 9 aa, Homo Sapiens
FAQTGIIVH

SEQ ID NO: 156745 - protein, 9 aa, Homo Sapiens
FARNKEIVH

SEQ ID NO: 156746 - protein, 9 aa, Homo Sapiens
FARSPGADL

SEQ ID NO: 156747 - protein, 9 aa, Homo Sapiens
FASEVSNVL

SEQ ID NO: 156748 - protein, 9 aa, Homo Sapiens
FASHVSPEV

SEQ ID NO: 156749 - protein, 9 aa, Homo Sapiens
FASIPGLEF

SEQ ID NO: 156750 - protein, 9 aa, Homo Sapiens
FASPMKSVV

SEQ ID NO: 156751 - protein, 9 aa, Homo Sapiens
FATEVRAVI

SEQ ID NO: 156752 - protein, 9 aa, Homo Sapiens
FATFPSSAF

SEQ ID NO: 156753 - protein, 9 aa, Homo Sapiens
FATHHSPEM

SEQ ID NO: 156754 - protein, 9 aa, Homo Sapiens
FATPPSSTY

SEQ ID NO: 156755 - protein, 9 aa, Homo Sapiens
FAVPHTYNY

SEQ ID NO: 156756 - protein, 9 aa, Homo Sapiens
FAVVPSTAT

SEQ ID NO: 156757 - protein, 9 aa, Homo Sapiens
FAYEGPMYL

SEQ ID NO: 156758 - protein, 9 aa, Homo Sapiens
FAYHYPYTY

SEQ ID NO: 156759 - protein, 9 aa, Homo Sapiens
FAYLGRLAH

SEQ ID NO: 156760 - protein, 9 aa, Homo Sapiens
FAYMPNNSL

SEQ ID NO: 156761 - protein, 9 aa, Homo Sapiens
FAYPAIRYL

SEQ ID NO: 156762 - protein, 9 aa, Homo Sapiens
FAYTVKYVL

SEQ ID NO: 156763 - protein, 9 aa, Homo Sapiens
FGADVVSKF

SEQ ID NO: 156764 - protein, 9 aa, Homo Sapiens
FGKAPGTPH

SEQ ID NO: 156765 - protein, 9 aa, Homo Sapiens
FGYDYPSVL

SEQ ID NO: 156766 - protein, 9 aa, Homo Sapiens
FGYPDPTYL

SEQ ID NO: 156767 - protein, 9 aa, Homo Sapiens
FIAPTGHSL

SEQ ID NO: 156768 - protein, 9 aa, Homo Sapiens
FIIPQIVKY

SEQ ID NO: 156769 - protein, 9 aa, Homo Sapiens
FIIQGLRSV

SEQ ID NO: 156770 - protein, 9 aa, Homo Sapiens
FIKASSMSH

SEQ ID NO: 156771 - protein, 9 aa, Homo Sapiens
FIKDGSSTY

SEQ ID NO: 156772 - protein, 9 aa, Homo Sapiens
FIKDRILVY

SEQ ID NO: 156773 - protein, 9 aa, Homo Sapiens
FIKEIGYTH

SEQ ID NO: 156774 - protein, 9 aa, Homo Sapiens
FIMGKTIEF

SEQ ID NO: 156775 - protein, 9 aa, Homo Sapiens
FINGDISSL

SEQ ID NO: 156776 - protein, 9 aa, Homo Sapiens
FINPKPITY

SEQ ID NO: 156777 - protein, 9 aa, Homo Sapiens
FIQTRGGTF

SEQ ID NO: 156778 - protein, 9 aa, Homo Sapiens
FIRVVGSEF

SEQ ID NO: 156779 - protein, 9 aa, Homo Sapiens
FIVDARPAM

SEQ ID NO: 156780 - protein, 9 aa, Homo Sapiens
FIYHLPQEF

SEQ ID NO: 156781 - protein, 9 aa, Homo Sapiens
FIYQNPHIF

SEQ ID NO: 156782 - protein, 9 aa, Homo Sapiens
FLAPLVTEY

SEQ ID NO: 156783 - protein, 9 aa, Homo Sapiens
FLAPPGAYY

SEQ ID NO: 156784 - protein, 9 aa, Homo Sapiens
FLFDGSPTY

SEQ ID NO: 156785 - protein, 9 aa, Homo Sapiens
FLIDRSPEY

SEQ ID NO: 156786 - protein, 9 aa, Homo Sapiens
FLKEIVETF

SEQ ID NO: 156787 - protein, 9 aa, Homo Sapiens
FLKEVVETF

SEQ ID NO: 156788 - protein, 9 aa, Homo Sapiens
FLRDKIASY

SEQ ID NO: 156789 - protein, 9 aa, Homo Sapiens
FLRDPARVF

SEQ ID NO: 156790 - protein, 9 aa, Homo Sapiens
FLREWVESM

SEQ ID NO: 156791 - protein, 9 aa, Homo Sapiens
FQAEIAQLM

SEQ ID NO: 156792 - protein, 9 aa, Homo Sapiens
FQAPTAKEM

SEQ ID NO: 156793 - protein, 9 aa, Homo Sapiens
FSAPLFLSH

SEQ ID NO: 156794 - protein, 9 aa, Homo Sapiens
FSCGVISTL

SEQ ID NO: 156795 - protein, 9 aa, Homo Sapiens
FSEPFHLIV

SEQ ID NO: 156796 - protein, 9 aa, Homo Sapiens
FSFDGPEIM

SEQ ID NO: 156797 - protein, 9 aa, Homo Sapiens
FSHIPEASF

SEQ ID NO: 156798 - protein, 9 aa, Homo Sapiens
FSIDSPDSL

SEQ ID NO: 156799 - protein, 9 aa, Homo Sapiens
FSKAKPSVL

SEQ ID NO: 156800 - protein, 9 aa, Homo Sapiens
FSKDIVENY

SEQ ID NO: 156801 - protein, 9 aa, Homo Sapiens
FSKPSSDTF

SEQ ID NO: 156802 - protein, 9 aa, Homo Sapiens
FSMYKPITY

SEQ ID NO: 156803 - protein, 9 aa, Homo Sapiens
FSNDIYSTY

SEQ ID NO: 156804 - protein, 9 aa, Homo Sapiens
FSNGHIKVL

SEQ ID NO: 156805 - protein, 9 aa, Homo Sapiens
FSNPYSIEY

SEQ ID NO: 156806 - protein, 9 aa, Homo Sapiens
FSQDHLVIY

SEQ ID NO: 156807 - protein, 9 aa, Homo Sapiens
FSSDLISIH

SEQ ID NO: 156808 - protein, 9 aa, Homo Sapiens
FSSDVTHEM

SEQ ID NO: 156809 - protein, 9 aa, Homo Sapiens
FSSPSTSTF

SEQ ID NO: 156810 - protein, 9 aa, Homo Sapiens
FSYAFPKEF

SEQ ID NO: 156811 - protein, 9 aa, Homo Sapiens
FSYQHAIEE

SEQ ID NO: 156812 - protein, 9 aa, Homo Sapiens
FTADVRSVL

SEQ ID NO: 156813 - protein, 9 aa, Homo Sapiens
FTFTPTVTY

SEQ ID NO: 156814 - protein, 9 aa, Homo Sapiens
FTHASPTLF

SEQ ID NO: 156815 - protein, 9 aa, Homo Sapiens
FTITKTVEY

SEQ ID NO: 156816 - protein, 9 aa, Homo Sapiens
FTKPPIAAH

SEQ ID NO: 156817 - protein, 9 aa, Homo Sapiens
FTLDNILSH

SEQ ID NO: 156818 - protein, 9 aa, Homo Sapiens
FTMPLHMTF

SEQ ID NO: 156819 - protein, 9 aa, Homo Sapiens
FTNKITSVH

SEQ ID NO: 156820 - protein, 9 aa, Homo Sapiens
FTRSINITH

SEQ ID NO: 156821 - protein, 9 aa, Homo Sapiens
FTVPHTHVF

SEQ ID NO: 156822 - protein, 9 aa, Homo Sapiens
FVITKPDVY

SEQ ID NO: 156823 - protein, 9 aa, Homo Sapiens
FVKDSGACF

SEQ ID NO: 156824 - protein, 9 aa, Homo Sapiens
FVKPAFEEF

SEQ ID NO: 156825 - protein, 9 aa, Homo Sapiens
FVKVVPTVY

SEQ ID NO: 156826 - protein, 9 aa, Homo Sapiens
FVNDYILYY

SEQ ID NO: 156827 - protein, 9 aa, Homo Sapiens
FVNPGVVEF

SEQ ID NO: 156828 - protein, 9 aa, Homo Sapiens
FVNPHVSSF

SEQ ID NO: 156829 - protein, 9 aa, Homo Sapiens
FVRDMIREV

SEQ ID NO: 156830 - protein, 9 aa, Homo Sapiens
FVRENVWTY

SEQ ID NO: 156831 - protein, 9 aa, Homo Sapiens
FVRNVPWEF

SEQ ID NO: 156832 - protein, 9 aa, Homo Sapiens
GALAPGTPA

SEQ ID NO: 156833 - protein, 9 aa, Homo Sapiens
GAPVAAAAL

SEQ ID NO: 156834 - protein, 9 aa, Homo Sapiens
GAVGFFTHY

SEQ ID NO: 156835 - protein, 9 aa, Homo Sapiens
GAVGFVTHY

SEQ ID NO: 156836 - protein, 9 aa, Homo Sapiens
GAYGQAVRY

SEQ ID NO: 156837 - protein, 9 aa, Homo Sapiens
GIIRPGTAF

SEQ ID NO: 156838 - protein, 9 aa, Homo Sapiens
GVGVGAAAV

SEQ ID NO: 156839 - protein, 9 aa, Homo Sapiens
GVKKPTKAL

SEQ ID NO: 156840 - protein, 9 aa, Homo Sapiens
HAAAPTSTL

SEQ ID NO: 156841 - protein, 9 aa, Homo Sapiens
HAAGFAYTY

SEQ ID NO: 156842 - protein, 9 aa, Homo Sapiens
HAAHIISEL

SEQ ID NO: 156843 - protein, 9 aa, Homo Sapiens
HAAPPAHPL

SEQ ID NO: 156844 - protein, 9 aa, Homo Sapiens
HACGVIATI

SEQ ID NO: 156845 - protein, 9 aa, Homo Sapiens
HAFVTEVAY

SEQ ID NO: 156846 - protein, 9 aa, Homo Sapiens
HAFWGGSVV

SEQ ID NO: 156847 - protein, 9 aa, Homo Sapiens
HAHLSQTTL

SEQ ID NO: 156848 - protein, 9 aa, Homo Sapiens
HAIPPTLAM

SEQ ID NO: 156849 - protein, 9 aa, Homo Sapiens
HAKPPTPSL

SEQ ID NO: 156850 - protein, 9 aa, Homo Sapiens
HAKTNISSY

SEQ ID NO: 156851 - protein, 9 aa, Homo Sapiens
HAMEKMEEF

SEQ ID NO: 156852 - protein, 9 aa, Homo Sapiens
HAMQFPAEL

SEQ ID NO: 156853 - protein, 9 aa, Homo Sapiens
HANDQTVIF

SEQ ID NO: 156854 - protein, 9 aa, Homo Sapiens
HANLTEVTF

SEQ ID NO: 156855 - protein, 9 aa, Homo Sapiens
HARGNLASY

SEQ ID NO: 156856 - protein, 9 aa, Homo Sapiens
HAVEISAVH

SEQ ID NO: 156857 - protein, 9 aa, Homo Sapiens
HAVEWPVVM

SEQ ID NO: 156858 - protein, 9 aa, Homo Sapiens
HAWSGGLDH

SEQ ID NO: 156859 - protein, 9 aa, Homo Sapiens
HAYPYPQMY

SEQ ID NO: 156860 - protein, 9 aa, Homo Sapiens
HGIDPTGTY

SEQ ID NO: 156861 - protein, 9 aa, Homo Sapiens
HIASFLSVF

SEQ ID NO: 156862 - protein, 9 aa, Homo Sapiens
HIIEDPCTL

SEQ ID NO: 156863 - protein, 9 aa, Homo Sapiens
HIITGVAVF

SEQ ID NO: 156864 - protein, 9 aa, Homo Sapiens
HIMEIFSTY

SEQ ID NO: 156865 - protein, 9 aa, Homo Sapiens
HINLMEVSY

SEQ ID NO: 156866 - protein, 9 aa, Homo Sapiens
HINSIKSVF

SEQ ID NO: 156867 - protein, 9 aa, Homo Sapiens
HIYDKTSVL

SEQ ID NO: 156868 - protein, 9 aa, Homo Sapiens
HLKDLIAVH

SEQ ID NO: 156869 - protein, 9 aa, Homo Sapiens
HLPSHIRIL

SEQ ID NO: 156870 - protein, 9 aa, Homo Sapiens
HSAGVGAIF

SEQ ID NO: 156871 - protein, 9 aa, Homo Sapiens
HSPGAVSSL

SEQ ID NO: 156872 - protein, 9 aa, Homo Sapiens
HTADISSHF

SEQ ID NO: 156873 - protein, 9 aa, Homo Sapiens
HTAMPGSVF

SEQ ID NO: 156874 - protein, 9 aa, Homo Sapiens
HTFLPKIFF

SEQ ID NO: 156875 - protein, 9 aa, Homo Sapiens
HTKLSLGSY

SEQ ID NO: 156876 - protein, 9 aa, Homo Sapiens
HVRDCVQTY

SEQ ID NO: 156877 - protein, 9 aa, Homo Sapiens
IAADILIKE

SEQ ID NO: 156878 - protein, 9 aa, Homo Sapiens
IAAGIFNDL

SEQ ID NO: 156879 - protein, 9 aa, Homo Sapiens
IAAPFTSKL

SEQ ID NO: 156880 - protein, 9 aa, Homo Sapiens
IAAPTSSAL

SEQ ID NO: 156881 - protein, 9 aa, Homo Sapiens
IAAVPATAM

SEQ ID NO: 156882 - protein, 9 aa, Homo Sapiens
IAFDPRSAY

SEQ ID NO: 156883 - protein, 9 aa, Homo Sapiens
IAFGFHQLY

SEQ ID NO: 156884 - protein, 9 aa, Homo Sapiens
IAFPKAEEL

SEQ ID NO: 156885 - protein, 9 aa, Homo Sapiens
IAFPTSISV

SEQ ID NO: 156886 - protein, 9 aa, Homo Sapiens
IAFSRPVKY

SEQ ID NO: 156887 - protein, 9 aa, Homo Sapiens
IAHDTGTSL

SEQ ID NO: 156888 - protein, 9 aa, Homo Sapiens
IAHGFFSVY

SEQ ID NO: 156889 - protein, 9 aa, Homo Sapiens
IAIEPGAAL

SEQ ID NO: 156890 - protein, 9 aa, Homo Sapiens
IAIPVTVAF

SEQ ID NO: 156891 - protein, 9 aa, Homo Sapiens
IAISLAQRY

SEQ ID NO: 156892 - protein, 9 aa, Homo Sapiens
IAISRTPVL

SEQ ID NO: 156893 - protein, 9 aa, Homo Sapiens
IAKAGIPVY

SEQ ID NO: 156894 - protein, 9 aa, Homo Sapiens
IAKATIEVF

SEQ ID NO: 156895 - protein, 9 aa, Homo Sapiens
IAKDEIGEF

SEQ ID NO: 156896 - protein, 9 aa, Homo Sapiens
IAKDVCTFL

SEQ ID NO: 156897 - protein, 9 aa, Homo Sapiens
IAKELSKTY

SEQ ID NO: 156898 - protein, 9 aa, Homo Sapiens
IAKENLDVF

SEQ ID NO: 156899 - protein, 9 aa, Homo Sapiens
IAKSGTKAF

SEQ ID NO: 156900 - protein, 9 aa, Homo Sapiens
IAKSGTSEF

SEQ ID NO: 156901 - protein, 9 aa, Homo Sapiens
IANENHSTL

SEQ ID NO: 156902 - protein, 9 aa, Homo Sapiens
IANMPASTF

SEQ ID NO: 156903 - protein, 9 aa, Homo Sapiens
IAPETRRSI

SEQ ID NO: 156904 - protein, 9 aa, Homo Sapiens
IAPTGHSLK

SEQ ID NO: 156905 - protein, 9 aa, Homo Sapiens
IASAIVNEL

SEQ ID NO: 156906 - protein, 9 aa, Homo Sapiens
IASDIVSRF

SEQ ID NO: 156907 - protein, 9 aa, Homo Sapiens
IASPVIAAV

SEQ ID NO: 156908 - protein, 9 aa, Homo Sapiens
IASPVQPVL

SEQ ID NO: 156909 - protein, 9 aa, Homo Sapiens
IAVGHIYFF

SEQ ID NO: 156910 - protein, 9 aa, Homo Sapiens
IAVGHIYYF

SEQ ID NO: 156911 - protein, 9 aa, Homo Sapiens
IAVGIMSYY

SEQ ID NO: 156912 - protein, 9 aa, Homo Sapiens
IAYEPQIGY

SEQ ID NO: 156913 - protein, 9 aa, Homo Sapiens
IAYSRPVYF

SEQ ID NO: 156914 - protein, 9 aa, Homo Sapiens
IGAPVGISL

SEQ ID NO: 156915 - protein, 9 aa, Homo Sapiens
IGKDVSTSY

SEQ ID NO: 156916 - protein, 9 aa, Homo Sapiens
IGVEHVVVY

SEQ ID NO: 156917 - protein, 9 aa, Homo Sapiens
IIAEPGRYY

SEQ ID NO: 156918 - protein, 9 aa, Homo Sapiens
IIHDLAQVY

SEQ ID NO: 156919 - protein, 9 aa, Homo Sapiens
IIHDPGRGA

SEQ ID NO: 156920 - protein, 9 aa, Homo Sapiens
IIIDKEYYY

SEQ ID NO: 156921 - protein, 9 aa, Homo Sapiens
IIKVGGERF

SEQ ID NO: 156922 - protein, 9 aa, Homo Sapiens
IINGKISFF

SEQ ID NO: 156923 - protein, 9 aa, Homo Sapiens
IIRKPVTVH

SEQ ID NO: 156924 - protein, 9 aa, Homo Sapiens
IISEPGSYY

SEQ ID NO: 156925 - protein, 9 aa, Homo Sapiens
IISSVIQKF

SEQ ID NO: 156926 - protein, 9 aa, Homo Sapiens
IKADHVSTY

SEQ ID NO: 156927 - protein, 9 aa, Homo Sapiens
ILGPPGSVY

SEQ ID NO: 156928 - protein, 9 aa, Homo Sapiens
IMKKIRESY

SEQ ID NO: 156929 - protein, 9 aa, Homo Sapiens
IQAGIFQEF

SEQ ID NO: 156930 - protein, 9 aa, Homo Sapiens
ISIGGLSSF

SEQ ID NO: 156931 - protein, 9 aa, Homo Sapiens
ISIGPGASF

SEQ ID NO: 156932 - protein, 9 aa, Homo Sapiens
ISKALVAYY

SEQ ID NO: 156933 - protein, 9 aa, Homo Sapiens
ISNLPAATF

SEQ ID NO: 156934 - protein, 9 aa, Homo Sapiens
ISPEFEPVF

SEQ ID NO: 156935 - protein, 9 aa, Homo Sapiens
ISPSHIWIF

SEQ ID NO: 156936 - protein, 9 aa, Homo Sapiens
ISRETGEPY

SEQ ID NO: 156937 - protein, 9 aa, Homo Sapiens
ISRWPLPEY

SEQ ID NO: 156938 - protein, 9 aa, Homo Sapiens
ISSPVVTSL

SEQ ID NO: 156939 - protein, 9 aa, Homo Sapiens
ISTPVIRTF

SEQ ID NO: 156940 - protein, 9 aa, Homo Sapiens
ITAPPGTAA

SEQ ID NO: 156941 - protein, 9 aa, Homo Sapiens
ITPEFISTF

SEQ ID NO: 156942 - protein, 9 aa, Homo Sapiens
IVAEPGAVL

SEQ ID NO: 156943 - protein, 9 aa, Homo Sapiens
IVIDPKNPL

SEQ ID NO: 156944 - protein, 9 aa, Homo Sapiens
IVKEMTEVF

SEQ ID NO: 156945 - protein, 9 aa, Homo Sapiens
IVKERGTVY

SEQ ID NO: 156946 - protein, 9 aa, Homo Sapiens
IVKKPGNIY

SEQ ID NO: 156947 - protein, 9 aa, Homo Sapiens
IVPGNVKSL

SEQ ID NO: 156948 - protein, 9 aa, Homo Sapiens
IVYPGIAVF

SEQ ID NO: 156949 - protein, 9 aa, Homo Sapiens
KAADIASKV

SEQ ID NO: 156950 - protein, 9 aa, Homo Sapiens
KAADIGVAM

SEQ ID NO: 156951 - protein, 9 aa, Homo Sapiens
KAAGFISVL

SEQ ID NO: 156952 - protein, 9 aa, Homo Sapiens
KAAGPSLSH

SEQ ID NO: 156953 - protein, 9 aa, Homo Sapiens
KAAHFFSTL

SEQ ID NO: 156954 - protein, 9 aa, Homo Sapiens
KAANAFHVY

SEQ ID NO: 156955 - protein, 9 aa, Homo Sapiens
KAANPGCSL

SEQ ID NO: 156956 - protein, 9 aa, Homo Sapiens
KAATVTGKL

SEQ ID NO: 156957 - protein, 9 aa, Homo Sapiens
KACDYIQEL

SEQ ID NO: 156958 - protein, 9 aa, Homo Sapiens
KAFDFPSSF

SEQ ID NO: 156959 - protein, 9 aa, Homo Sapiens
KAFDRPSLF

SEQ ID NO: 156960 - protein, 9 aa, Homo Sapiens
KAFDSPSVF

SEQ ID NO: 156961 - protein, 9 aa, Homo Sapiens
KAFDYPSRF

SEQ ID NO: 156962 - protein, 9 aa, Homo Sapiens
KAFGSKSTL

SEQ ID NO: 156963 - protein, 9 aa, Homo Sapiens
KAFIQKSHF

SEQ ID NO: 156964 - protein, 9 aa, Homo Sapiens
KAFNQSSTL

SEQ ID NO: 156965 - protein, 9 aa, Homo Sapiens
KAFNWPSTL

SEQ ID NO: 156966 - protein, 9 aa, Homo Sapiens
KAFPFHIIF

SEQ ID NO: 156967 - protein, 9 aa, Homo Sapiens
KAFPFYSSY

SEQ ID NO: 156968 - protein, 9 aa, Homo Sapiens
KAFPYSSHL

SEQ ID NO: 156969 - protein, 9 aa, Homo Sapiens
KAFQHPSHL

SEQ ID NO: 156970 - protein, 9 aa, Homo Sapiens
KAFQKIVVL

SEQ ID NO: 156971 - protein, 9 aa, Homo Sapiens
KAFSHGSSL

SEQ ID NO: 156972 - protein, 9 aa, Homo Sapiens
KAFSHSSTL

SEQ ID NO: 156973 - protein, 9 aa, Homo Sapiens
KAFSQSSTL

SEQ ID NO: 156974 - protein, 9 aa, Homo Sapiens
KAFSYPSKL

SEQ ID NO: 156975 - protein, 9 aa, Homo Sapiens
KAFTHYSTY

SEQ ID NO: 156976 - protein, 9 aa, Homo Sapiens
KAFTKSSTL

SEQ ID NO: 156977 - protein, 9 aa, Homo Sapiens
KAFVYPSVF

SEQ ID NO: 156978 - protein, 9 aa, Homo Sapiens
KAHGSPRVY

SEQ ID NO: 156979 - protein, 9 aa, Homo Sapiens
KAIATTVTY

SEQ ID NO: 156980 - protein, 9 aa, Homo Sapiens
KAIDFAASL

SEQ ID NO: 156981 - protein, 9 aa, Homo Sapiens
KAIELLQEF

SEQ ID NO: 156982 - protein, 9 aa, Homo Sapiens
KAINPINTF

SEQ ID NO: 156983 - protein, 9 aa, Homo Sapiens
KAISGVHTV

SEQ ID NO: 156984 - protein, 9 aa, Homo Sapiens
KAITFVTQY

SEQ ID NO: 156985 - protein, 9 aa, Homo Sapiens
KAKDGTHVL

SEQ ID NO: 156986 - protein, 9 aa, Homo Sapiens
KAKEIYMTF

SEQ ID NO: 156987 - protein, 9 aa, Homo Sapiens
KAKKIIETM

SEQ ID NO: 156988 - protein, 9 aa, Homo Sapiens
KAKNLIEVM

SEQ ID NO: 156989 - protein, 9 aa, Homo Sapiens
KAKPVTTNL

SEQ ID NO: 156990 - protein, 9 aa, Homo Sapiens
KAMEAASSL

SEQ ID NO: 156991 - protein, 9 aa, Homo Sapiens
KAMELIREL

SEQ ID NO: 156992 - protein, 9 aa, Homo Sapiens
KAMGIMNSF

SEQ ID NO: 156993 - protein, 9 aa, Homo Sapiens
KAMYPGTFY

SEQ ID NO: 156994 - protein, 9 aa, Homo Sapiens
KAPGSTSNL

SEQ ID NO: 156995 - protein, 9 aa, Homo Sapiens
KAPVTKVAA

SEQ ID NO: 156996 - protein, 9 aa, Homo Sapiens
KAQSVREVF

SEQ ID NO: 156997 - protein, 9 aa, Homo Sapiens
KAQVALTEY

SEQ ID NO: 156998 - protein, 9 aa, Homo Sapiens
KASGIIHSY

SEQ ID NO: 156999 - protein, 9 aa, Homo Sapiens
KASGTLREY

SEQ ID NO: 157000 - protein, 9 aa, Homo Sapiens
KASNPRTTF

SEQ ID NO: 157001 - protein, 9 aa, Homo Sapiens
KAVNPGRSL

SEQ ID NO: 157002 - protein, 9 aa, Homo Sapiens
KAVSLFLCY

SEQ ID NO: 157003 - protein, 9 aa, Homo Sapiens
KAYGASKTF

SEQ ID NO: 157004 - protein, 9 aa, Homo Sapiens
KAYPFPLSH

SEQ ID NO: 157005 - protein, 9 aa, Homo Sapiens
KIIDGLLVM

SEQ ID NO: 157006 - protein, 9 aa, Homo Sapiens
KIKNGTPPM

SEQ ID NO: 157007 - protein, 9 aa, Homo Sapiens
KIKPVSLTF

SEQ ID NO: 157008 - protein, 9 aa, Homo Sapiens
KIKTIGSTY

SEQ ID NO: 157009 - protein, 9 aa, Homo Sapiens
KIRDLLPVM

SEQ ID NO: 157010 - protein, 9 aa, Homo Sapiens
KIRPHIATL

SEQ ID NO: 157011 - protein, 9 aa, Homo Sapiens
KLPDFESRY

SEQ ID NO: 157012 - protein, 9 aa, Homo Sapiens
KLPDIFSVY

SEQ ID NO: 157013 - protein, 9 aa, Homo Sapiens
KQAEIVKRL

SEQ ID NO: 157014 - protein, 9 aa, Homo Sapiens
KQFHRIVTY

SEQ ID NO: 157015 - protein, 9 aa, Homo Sapiens
KQFPEVIKY

SEQ ID NO: 157016 - protein, 9 aa, Homo Sapiens
KSFPGGKEY

SEQ ID NO: 157017 - protein, 9 aa, Homo Sapiens
KSIHIVVTM

SEQ ID NO: 157018 - protein, 9 aa, Homo Sapiens
KSKNPGEAL

SEQ ID NO: 157019 - protein, 9 aa, Homo Sapiens
KSMFQRTTY

SEQ ID NO: 157020 - protein, 9 aa, Homo Sapiens
KSNELFTTF

SEQ ID NO: 157021 - protein, 9 aa, Homo Sapiens
KSPSHVWIF

SEQ ID NO: 157022 - protein, 9 aa, Homo Sapiens
KSSEVFTTF

SEQ ID NO: 157023 - protein, 9 aa, Homo Sapiens
KSVDWLLVF

SEQ ID NO: 157024 - protein, 9 aa, Homo Sapiens
KSVRPGASY

SEQ ID NO: 157025 - protein, 9 aa, Homo Sapiens
KTFDHYCEY

SEQ ID NO: 157026 - protein, 9 aa, Homo Sapiens
KTGPVAKEL

SEQ ID NO: 157027 - protein, 9 aa, Homo Sapiens
KTKDPTAAL

SEQ ID NO: 157028 - protein, 9 aa, Homo Sapiens
KTPDFILQV

SEQ ID NO: 157029 - protein, 9 aa, Homo Sapiens
KTQKPSKPF

SEQ ID NO: 157030 - protein, 9 aa, Homo Sapiens
KTRIPPRTY

SEQ ID NO: 157031 - protein, 9 aa, Homo Sapiens
KVADPVVTF

SEQ ID NO: 157032 - protein, 9 aa, Homo Sapiens
KVAQPKEVY

SEQ ID NO: 157033 - protein, 9 aa, Homo Sapiens
KVFNIPSSF

SEQ ID NO: 157034 - protein, 9 aa, Homo Sapiens
LAADCAHEL

SEQ ID NO: 157035 - protein, 9 aa, Homo Sapiens
LAADIFAIA

SEQ ID NO: 157036 - protein, 9 aa, Homo Sapiens
LAAPVISVL

SEQ ID NO: 157037 - protein, 9 aa, Homo Sapiens
LAASASAEF

SEQ ID NO: 157038 - protein, 9 aa, Homo Sapiens
LAFEWLGHF

SEQ ID NO: 157039 - protein, 9 aa, Homo Sapiens
LAFPGEMLL

SEQ ID NO: 157040 - protein, 9 aa, Homo Sapiens
LAFPTGCSL

SEQ ID NO: 157041 - protein, 9 aa, Homo Sapiens
LAFSRLIVE

SEQ ID NO: 157042 - protein, 9 aa, Homo Sapiens
LAGQATTAY

SEQ ID NO: 157043 - protein, 9 aa, Homo Sapiens
LAHEVGWKY

SEQ ID NO: 157044 - protein, 9 aa, Homo Sapiens
LAIEHVRFF

SEQ ID NO: 157045 - protein, 9 aa, Homo Sapiens
LAINHAYFY

SEQ ID NO: 157046 - protein, 9 aa, Homo Sapiens
LAIPITNTY

SEQ ID NO: 157047 - protein, 9 aa, Homo Sapiens
LAKAPFAAH

SEQ ID NO: 157048 - protein, 9 aa, Homo Sapiens
LAKASGNTL

SEQ ID NO: 157049 - protein, 9 aa, Homo Sapiens
LAKEVGTSY

SEQ ID NO: 157050 - protein, 9 aa, Homo Sapiens
LAKGEVTEM

SEQ ID NO: 157051 - protein, 9 aa, Homo Sapiens
LAKGGTVEY

SEQ ID NO: 157052 - protein, 9 aa, Homo Sapiens
LAKGWAPTF

SEQ ID NO: 157053 - protein, 9 aa, Homo Sapiens
LAKTGVHHY

SEQ ID NO: 157054 - protein, 9 aa, Homo Sapiens
LAKTQGNVF

SEQ ID NO: 157055 - protein, 9 aa, Homo Sapiens
LALEPGVAY

SEQ ID NO: 157056 - protein, 9 aa, Homo Sapiens
LANKLITVY

SEQ ID NO: 157057 - protein, 9 aa, Homo Sapiens
LAQTTRTAY

SEQ ID NO: 157058 - protein, 9 aa, Homo Sapiens
LARCSIVSY

SEQ ID NO: 157059 - protein, 9 aa, Homo Sapiens
LARDFLDEY

SEQ ID NO: 157060 - protein, 9 aa, Homo Sapiens
LARIIDSEY

SEQ ID NO: 157061 - protein, 9 aa, Homo Sapiens
LARPLPVEY

SEQ ID NO: 157062 - protein, 9 aa, Homo Sapiens
LARTAGTSF

SEQ ID NO: 157063 - protein, 9 aa, Homo Sapiens
LASAVISVL

SEQ ID NO: 157064 - protein, 9 aa, Homo Sapiens
LASEIYDIL

SEQ ID NO: 157065 - protein, 9 aa, Homo Sapiens
LASELIQVH

SEQ ID NO: 157066 - protein, 9 aa, Homo Sapiens
LASPIYTHF

SEQ ID NO: 157067 - protein, 9 aa, Homo Sapiens
LASPVSPEL

SEQ ID NO: 157068 - protein, 9 aa, Homo Sapiens
LATEVVTVF

SEQ ID NO: 157069 - protein, 9 aa, Homo Sapiens
LAVGLTSCF

SEQ ID NO: 157070 - protein, 9 aa, Homo Sapiens
LIHVPLETF

SEQ ID NO: 157071 - protein, 9 aa, Homo Sapiens
LIKETTTGY

SEQ ID NO: 157072 - protein, 9 aa, Homo Sapiens
LIKRNKQTY

SEQ ID NO: 157073 - protein, 9 aa, Homo Sapiens
LIRDNRVVY

SEQ ID NO: 157074 - protein, 9 aa, Homo Sapiens
LIREYIVEY

SEQ ID NO: 157075 - protein, 9 aa, Homo Sapiens
LIRPVSASF

SEQ ID NO: 157076 - protein, 9 aa, Homo Sapiens
LLKSPGACF

SEQ ID NO: 157077 - protein, 9 aa, Homo Sapiens
LMMGHPGMH

SEQ ID NO: 157078 - protein, 9 aa, Homo Sapiens
LQAESIVVH

SEQ ID NO: 157079 - protein, 9 aa, Homo Sapiens
LQIGVIRVY

SEQ ID NO: 157080 - protein, 9 aa, Homo Sapiens
LSADPRSVY

SEQ ID NO: 157081 - protein, 9 aa, Homo Sapiens
LSAPIHTQM

SEQ ID NO: 157082 - protein, 9 aa, Homo Sapiens
LSFLIPSSL

SEQ ID NO: 157083 - protein, 9 aa, Homo Sapiens
LSFPTTKTY

SEQ ID NO: 157084 - protein, 9 aa, Homo Sapiens
LSHLPSHHY

SEQ ID NO: 157085 - protein, 9 aa, Homo Sapiens
LSKDDIENM

SEQ ID NO: 157086 - protein, 9 aa, Homo Sapiens
LSKGPGLEV

SEQ ID NO: 157087 - protein, 9 aa, Homo Sapiens
LSKLPCGEY

SEQ ID NO: 157088 - protein, 9 aa, Homo Sapiens
LSPTPATAL

SEQ ID NO: 157089 - protein, 9 aa, Homo Sapiens
LTFPHPVYY

SEQ ID NO: 157090 - protein, 9 aa, Homo Sapiens
LTNLPHTDF

SEQ ID NO: 157091 - protein, 9 aa, Homo Sapiens
LTRDTIASH

SEQ ID NO: 157092 - protein, 9 aa, Homo Sapiens
LVKEVPEEY

SEQ ID NO: 157093 - protein, 9 aa, Homo Sapiens
MAADVSVTH

SEQ ID NO: 157094 - protein, 9 aa, Homo Sapiens
MAAEIKTEY

SEQ ID NO: 157095 - protein, 9 aa, Homo Sapiens
MAAMPQTVY

SEQ ID NO: 157096 - protein, 9 aa, Homo Sapiens
MAASIGTDF

SEQ ID NO: 157097 - protein, 9 aa, Homo Sapiens
MADPNIRFL

SEQ ID NO: 157098 - protein, 9 aa, Homo Sapiens
MAFDPTSTL

SEQ ID NO: 157099 - protein, 9 aa, Homo Sapiens
MAFSPNEKF

SEQ ID NO: 157100 - protein, 9 aa, Homo Sapiens
MAGDIYSVF

SEQ ID NO: 157101 - protein, 9 aa, Homo Sapiens
MAHQIQEMF

SEQ ID NO: 157102 - protein, 9 aa, Homo Sapiens
MAIANTRTH

SEQ ID NO: 157103 - protein, 9 aa, Homo Sapiens
MAIEAQQKF

SEQ ID NO: 157104 - protein, 9 aa, Homo Sapiens
MAKDNVPFH

SEQ ID NO: 157105 - protein, 9 aa, Homo Sapiens
MAKQEGMEM

SEQ ID NO: 157106 - protein, 9 aa, Homo Sapiens
MANGAVIHL

SEQ ID NO: 157107 - protein, 9 aa, Homo Sapiens
MANGEIHIY

SEQ ID NO: 157108 - protein, 9 aa, Homo Sapiens
MAPLKMLAL

SEQ ID NO: 157109 - protein, 9 aa, Homo Sapiens
MAQEVLTHL

SEQ ID NO: 157110 - protein, 9 aa, Homo Sapiens
MARSPGRAY

SEQ ID NO: 157111 - protein, 9 aa, Homo Sapiens
MGFSGIVVH

SEQ ID NO: 157112 - protein, 9 aa, Homo Sapiens
MGRDPGVSF

SEQ ID NO: 157113 - protein, 9 aa, Homo Sapiens
MIISPGRYF

SEQ ID NO: 157114 - protein, 9 aa, Homo Sapiens
MSKAPSNTF

SEQ ID NO: 157115 - protein, 9 aa, Homo Sapiens
MTKKPGMFF

SEQ ID NO: 157116 - protein, 9 aa, Homo Sapiens
MVVEERCVY

SEQ ID NO: 157117 - protein, 9 aa, Homo Sapiens
NAAAIYDLL

SEQ ID NO: 157118 - protein, 9 aa, Homo Sapiens
NAAERRGPL

SEQ ID NO: 157119 - protein, 9 aa, Homo Sapiens
NAAPPPVTY

SEQ ID NO: 157120 - protein, 9 aa, Homo Sapiens
NAAQIFAIY

SEQ ID NO: 157121 - protein, 9 aa, Homo Sapiens
NAFHHPSAV

SEQ ID NO: 157122 - protein, 9 aa, Homo Sapiens
NAFKEITTM

SEQ ID NO: 157123 - protein, 9 aa, Homo Sapiens
NAFPVGSEY

SEQ ID NO: 157124 - protein, 9 aa, Homo Sapiens
NAFSGVMML

SEQ ID NO: 157125 - protein, 9 aa, Homo Sapiens
NAHYPKQSF

SEQ ID NO: 157126 - protein, 9 aa, Homo Sapiens
NAIEGLTEY

SEQ ID NO: 157127 - protein, 9 aa, Homo Sapiens
NAIGVAATM

SEQ ID NO: 157128 - protein, 9 aa, Homo Sapiens
NAIKASLPH

SEQ ID NO: 157129 - protein, 9 aa, Homo Sapiens
NAINITSAL

SEQ ID NO: 157130 - protein, 9 aa, Homo Sapiens
NAIQTMCPH

SEQ ID NO: 157131 - protein, 9 aa, Homo Sapiens
NAISGPNEF

SEQ ID NO: 157132 - protein, 9 aa, Homo Sapiens
NAISVTTSY

SEQ ID NO: 157133 - protein, 9 aa, Homo Sapiens
NAITLPEEF

SEQ ID NO: 157134 - protein, 9 aa, Homo Sapiens
NAKAQTPIF

SEQ ID NO: 157135 - protein, 9 aa, Homo Sapiens
NAKCPNLEF

SEQ ID NO: 157136 - protein, 9 aa, Homo Sapiens
NAKGYTIPL

SEQ ID NO: 157137 - protein, 9 aa, Homo Sapiens
NAKLKILEH

SEQ ID NO: 157138 - protein, 9 aa, Homo Sapiens
NAMDFSSVF

SEQ ID NO: 157139 - protein, 9 aa, Homo Sapiens
NARPAVASY

SEQ ID NO: 157140 - protein, 9 aa, Homo Sapiens
NASPVISSV

SEQ ID NO: 157141 - protein, 9 aa, Homo Sapiens
NATKARIPF

SEQ ID NO: 157142 - protein, 9 aa, Homo Sapiens
NAVAFLSSF

SEQ ID NO: 157143 - protein, 9 aa, Homo Sapiens
NAVHWQPVF

SEQ ID NO: 157144 - protein, 9 aa, Homo Sapiens
NAYSSPSVV

SEQ ID NO: 157145 - protein, 9 aa, Homo Sapiens
NAYTGIVLL

SEQ ID NO: 157146 - protein, 9 aa, Homo Sapiens
NIICGITSV

SEQ ID NO: 157147 - protein, 9 aa, Homo Sapiens
NIKFIGELF

SEQ ID NO: 157148 - protein, 9 aa, Homo Sapiens
NIKSPALAF

SEQ ID NO: 157149 - protein, 9 aa, Homo Sapiens
NIRDQTISY

SEQ ID NO: 157150 - protein, 9 aa, Homo Sapiens
NIREIEIDY

SEQ ID NO: 157151 - protein, 9 aa, Homo Sapiens
NISSGHVPH

SEQ ID NO: 157152 - protein, 9 aa, Homo Sapiens
NLKAPSRHY

SEQ ID NO: 157153 - protein, 9 aa, Homo Sapiens
NLKSHILTH

SEQ ID NO: 157154 - protein, 9 aa, Homo Sapiens
NQIPFIIQY

SEQ ID NO: 157155 - protein, 9 aa, Homo Sapiens
NSFGSPLEF

SEQ ID NO: 157156 - protein, 9 aa, Homo Sapiens
NSRAPTTTM

SEQ ID NO: 157157 - protein, 9 aa, Homo Sapiens
NSRGIWLSY

SEQ ID NO: 157158 - protein, 9 aa, Homo Sapiens
NSSPVINHL

SEQ ID NO: 157159 - protein, 9 aa, Homo Sapiens
NTIDPSHPM

SEQ ID NO: 157160 - protein, 9 aa, Homo Sapiens
NTIDSTSSF

SEQ ID NO: 157161 - protein, 9 aa, Homo Sapiens
NTKEPPLSL

SEQ ID NO: 157162 - protein, 9 aa, Homo Sapiens
NVIRDAVTY

SEQ ID NO: 157163 - protein, 9 aa, Homo Sapiens
NVKEAPTEY

SEQ ID NO: 157164 - protein, 9 aa, Homo Sapiens
NVNVIISTY

SEQ ID NO: 157165 - protein, 9 aa, Homo Sapiens
NVRTATESF

SEQ ID NO: 157166 - protein, 9 aa, Homo Sapiens
PAGVGPGLS

SEQ ID NO: 157167 - protein, 9 aa, Homo Sapiens
PIRPDIVNF

SEQ ID NO: 157168 - protein, 9 aa, Homo Sapiens
QAADTVVIF

SEQ ID NO: 157169 - protein, 9 aa, Homo Sapiens
QAASILTKF

SEQ ID NO: 157170 - protein, 9 aa, Homo Sapiens
QAFPGGHSM

SEQ ID NO: 157171 - protein, 9 aa, Homo Sapiens
QAIQWILHY

SEQ ID NO: 157172 - protein, 9 aa, Homo Sapiens
QAMGKTSFF

SEQ ID NO: 157173 - protein, 9 aa, Homo Sapiens
QASHPSAHF

SEQ ID NO: 157174 - protein, 9 aa, Homo Sapiens
QAVAIFTVY

SEQ ID NO: 157175 - protein, 9 aa, Homo Sapiens
QAYAVPYQY

SEQ ID NO: 157176 - protein, 9 aa, Homo Sapiens
QIPEIKQTL

SEQ ID NO: 157177 - protein, 9 aa, Homo Sapiens
QIRDVPVLY

SEQ ID NO: 157178 - protein, 9 aa, Homo Sapiens
QLGPVGGVF

SEQ ID NO: 157179 - protein, 9 aa, Homo Sapiens
QSVHFQTIF

SEQ ID NO: 157180 - protein, 9 aa, Homo Sapiens
QVKNPPHTY

SEQ ID NO: 157181 - protein, 9 aa, Homo Sapiens
QVYGGVTYY

SEQ ID NO: 157182 - protein, 9 aa, Homo Sapiens
RAAAKLLSH

SEQ ID NO: 157183 - protein, 9 aa, Homo Sapiens
RAADLLAVH

SEQ ID NO: 157184 - protein, 9 aa, Homo Sapiens
RAADVLVYL

SEQ ID NO: 157185 - protein, 9 aa, Homo Sapiens
RAAEILYYF

SEQ ID NO: 157186 - protein, 9 aa, Homo Sapiens
RAAEIRETL

SEQ ID NO: 157187 - protein, 9 aa, Homo Sapiens
RAAPFSLEY

SEQ ID NO: 157188 - protein, 9 aa, Homo Sapiens
RAFCTGQEL

SEQ ID NO: 157189 - protein, 9 aa, Homo Sapiens
RAFDCPSSF

SEQ ID NO: 157190 - protein, 9 aa, Homo Sapiens
RAFEYEIRF

SEQ ID NO: 157191 - protein, 9 aa, Homo Sapiens
RAHAAEVSF

SEQ ID NO: 157192 - protein, 9 aa, Homo Sapiens
RAIEIYTDM

SEQ ID NO: 157193 - protein, 9 aa, Homo Sapiens
RAIENIDTL

SEQ ID NO: 157194 - protein, 9 aa, Homo Sapiens
RAKDIKSSL

SEQ ID NO: 157195 - protein, 9 aa, Homo Sapiens
RAKQPPSTF

SEQ ID NO: 157196 - protein, 9 aa, Homo Sapiens
RANEPCTSF

SEQ ID NO: 157197 - protein, 9 aa, Homo Sapiens
RANPFNTPH

SEQ ID NO: 157198 - protein, 9 aa, Homo Sapiens
RAQDKVHYY

SEQ ID NO: 157199 - protein, 9 aa, Homo Sapiens
RAQPRGAVY

SEQ ID NO: 157200 - protein, 9 aa, Homo Sapiens
RARELLVSY

SEQ ID NO: 157201 - protein, 9 aa, Homo Sapiens
RARPATDSF

SEQ ID NO: 157202 - protein, 9 aa, Homo Sapiens
RASPLFSQH

SEQ ID NO: 157203 - protein, 9 aa, Homo Sapiens
RASWIAQVF

SEQ ID NO: 157204 - protein, 9 aa, Homo Sapiens
RAVEAQSCY

SEQ ID NO: 157205 - protein, 9 aa, Homo Sapiens
RAVEPAQQY

SEQ ID NO: 157206 - protein, 9 aa, Homo Sapiens
RAVWHTNVF

SEQ ID NO: 157207 - protein, 9 aa, Homo Sapiens
RAYGRDIVE

SEQ ID NO: 157208 - protein, 9 aa, Homo Sapiens
RIADISQVY

SEQ ID NO: 157209 - protein, 9 aa, Homo Sapiens
RIHFPLATY

SEQ ID NO: 157210 - protein, 9 aa, Homo Sapiens
RIKAINTFF

SEQ ID NO: 157211 - protein, 9 aa, Homo Sapiens
RIKDKVVTH

SEQ ID NO: 157212 - protein, 9 aa, Homo Sapiens
RIKDLGQFY

SEQ ID NO: 157213 - protein, 9 aa, Homo Sapiens
RIKETKEVY

SEQ ID NO: 157214 - protein, 9 aa, Homo Sapiens
RIKKDPVPY

SEQ ID NO: 157215 - protein, 9 aa, Homo Sapiens
RIKPNAITY

SEQ ID NO: 157216 - protein, 9 aa, Homo Sapiens
RIPSFVTEL

SEQ ID NO: 157217 - protein, 9 aa, Homo Sapiens
RIREDIAKY

SEQ ID NO: 157218 - protein, 9 aa, Homo Sapiens
RLKNPTVEY

SEQ ID NO: 157219 - protein, 9 aa, Homo Sapiens
RLPAWQPIL

SEQ ID NO: 157220 - protein, 9 aa, Homo Sapiens
RMKEVGKVF

SEQ ID NO: 157221 - protein, 9 aa, Homo Sapiens
RQADFVQVL

SEQ ID NO: 157222 - protein, 9 aa, Homo Sapiens
RQINWTVLY

SEQ ID NO: 157223 - protein, 9 aa, Homo Sapiens
RSPDFASSF

SEQ ID NO: 157224 - protein, 9 aa, Homo Sapiens
RSSPPGHYY

SEQ ID NO: 157225 - protein, 9 aa, Homo Sapiens
RTHLPGRTY

SEQ ID NO: 157226 - protein, 9 aa, Homo Sapiens
RTKDTPLSL

SEQ ID NO: 157227 - protein, 9 aa, Homo Sapiens
RTNAIKQTF

SEQ ID NO: 157228 - protein, 9 aa, Homo Sapiens
RVFPYISVM

SEQ ID NO: 157229 - protein, 9 aa, Homo Sapiens
RVKEIGSTM

SEQ ID NO: 157230 - protein, 9 aa, Homo Sapiens
RVYHAVSVM

SEQ ID NO: 157231 - protein, 9 aa, Homo Sapiens
RVYPQAVYF

SEQ ID NO: 157232 - protein, 9 aa, Homo Sapiens
SAAAVFSHF

SEQ ID NO: 157233 - protein, 9 aa, Homo Sapiens
SAADFFSHY

SEQ ID NO: 157234 - protein, 9 aa, Homo Sapiens
SAADVVVVH

SEQ ID NO: 157235 - protein, 9 aa, Homo Sapiens
SAAEIMAVL

SEQ ID NO: 157236 - protein, 9 aa, Homo Sapiens
SAAFPGASL

SEQ ID NO: 157237 - protein, 9 aa, Homo Sapiens
SAAGLHRAL

SEQ ID NO: 157238 - protein, 9 aa, Homo Sapiens
SAAKTGVRF

SEQ ID NO: 157239 - protein, 9 aa, Homo Sapiens
SAAMPGASL

SEQ ID NO: 157240 - protein, 9 aa, Homo Sapiens
SAAMVFSAL

SEQ ID NO: 157241 - protein, 9 aa, Homo Sapiens
SAANIQPIF

SEQ ID NO: 157242 - protein, 9 aa, Homo Sapiens
SAAPEGVPL

SEQ ID NO: 157243 - protein, 9 aa, Homo Sapiens
SAAPFAQRY

SEQ ID NO: 157244 - protein, 9 aa, Homo Sapiens
SAAPFFVLF

SEQ ID NO: 157245 - protein, 9 aa, Homo Sapiens
SAAPGTASL

SEQ ID NO: 157246 - protein, 9 aa, Homo Sapiens
SAAPGVGSV

SEQ ID NO: 157247 - protein, 9 aa, Homo Sapiens
SAAPPGLEA

SEQ ID NO: 157248 - protein, 9 aa, Homo Sapiens
SAAQPGVAF

SEQ ID NO: 157249 - protein, 9 aa, Homo Sapiens
SAASLYPVL

SEQ ID NO: 157250 - protein, 9 aa, Homo Sapiens
SAASVVSEI

SEQ ID NO: 157251 - protein, 9 aa, Homo Sapiens
SAATIVAKH

SEQ ID NO: 157252 - protein, 9 aa, Homo Sapiens
SACGHTAVL

SEQ ID NO: 157253 - protein, 9 aa, Homo Sapiens
SAFDEAMSY

SEQ ID NO: 157254 - protein, 9 aa, Homo Sapiens
SAFDRCATL

SEQ ID NO: 157255 - protein, 9 aa, Homo Sapiens
SAFPFPVTV

SEQ ID NO: 157256 - protein, 9 aa, Homo Sapiens
SAFTNRIFF

SEQ ID NO: 157257 - protein, 9 aa, Homo Sapiens
SAGVGAAHF

SEQ ID NO: 157258 - protein, 9 aa, Homo Sapiens
SAHLAFMTF

SEQ ID NO: 157259 - protein, 9 aa, Homo Sapiens
SAHNLQSVF

SEQ ID NO: 157260 - protein, 9 aa, Homo Sapiens
SAIASTKVM

SEQ ID NO: 157261 - protein, 9 aa, Homo Sapiens
SAIDRIFTL

SEQ ID NO: 157262 - protein, 9 aa, Homo Sapiens
SAIGYIHSL

SEQ ID NO: 157263 - protein, 9 aa, Homo Sapiens
SAIKTPQCY

SEQ ID NO: 157264 - protein, 9 aa, Homo Sapiens
SAILHPSTY

SEQ ID NO: 157265 - protein, 9 aa, Homo Sapiens
SAIPHPLIM

SEQ ID NO: 157266 - protein, 9 aa, Homo Sapiens
SAISRAASV

SEQ ID NO: 157267 - protein, 9 aa, Homo Sapiens
SAKDGTCTL

SEQ ID NO: 157268 - protein, 9 aa, Homo Sapiens
SAKDLICTH

SEQ ID NO: 157269 - protein, 9 aa, Homo Sapiens
SAKDWPQTF

SEQ ID NO: 157270 - protein, 9 aa, Homo Sapiens
SAKFASCFY

SEQ ID NO: 157271 - protein, 9 aa, Homo Sapiens
SAKITGVSH

SEQ ID NO: 157272 - protein, 9 aa, Homo Sapiens
SAKPEISAM

SEQ ID NO: 157273 - protein, 9 aa, Homo Sapiens
SAKPPTHKY

SEQ ID NO: 157274 - protein, 9 aa, Homo Sapiens
SAKPQTTVF

SEQ ID NO: 157275 - protein, 9 aa, Homo Sapiens
SAKSPTATF

SEQ ID NO: 157276 - protein, 9 aa, Homo Sapiens
SAKTPGFSV

SEQ ID NO: 157277 - protein, 9 aa, Homo Sapiens
SAKVANASY

SEQ ID NO: 157278 - protein, 9 aa, Homo Sapiens
SAKVPSDEY

SEQ ID NO: 157279 - protein, 9 aa, Homo Sapiens
SALVTGQSY

SEQ ID NO: 157280 - protein, 9 aa, Homo Sapiens
SAMEVVPAL

SEQ ID NO: 157281 - protein, 9 aa, Homo Sapiens
SAMPTSSSF

SEQ ID NO: 157282 - protein, 9 aa, Homo Sapiens
SAMSNPRAM

SEQ ID NO: 157283 - protein, 9 aa, Homo Sapiens
SAMSRPIIH

SEQ ID NO: 157284 - protein, 9 aa, Homo Sapiens
SANDAIATL

SEQ ID NO: 157285 - protein, 9 aa, Homo Sapiens
SANDFFSYY

SEQ ID NO: 157286 - protein, 9 aa, Homo Sapiens
SANVSKVSF

SEQ ID NO: 157287 - protein, 9 aa, Homo Sapiens
SAPASQASL

SEQ ID NO: 157288 - protein, 9 aa, Homo Sapiens
SAPGIISAL

SEQ ID NO: 157289 - protein, 9 aa, Homo Sapiens
SAPSHSTSL

SEQ ID NO: 157290 - protein, 9 aa, Homo Sapiens
SAPSSSTPF

SEQ ID NO: 157291 - protein, 9 aa, Homo Sapiens
SAREAAASL

SEQ ID NO: 157292 - protein, 9 aa, Homo Sapiens
SARIIGVSH

SEQ ID NO: 157293 - protein, 9 aa, Homo Sapiens
SARTPGPAV

SEQ ID NO: 157294 - protein, 9 aa, Homo Sapiens
SASDHIVQF

SEQ ID NO: 157295 - protein, 9 aa, Homo Sapiens
SASDVHGNF

SEQ ID NO: 157296 - protein, 9 aa, Homo Sapiens
SASGPFESH

SEQ ID NO: 157297 - protein, 9 aa, Homo Sapiens
SASPIFTHV

SEQ ID NO: 157298 - protein, 9 aa, Homo Sapiens
SASPSTSSF

SEQ ID NO: 157299 - protein, 9 aa, Homo Sapiens
SASVVFTTY

SEQ ID NO: 157300 - protein, 9 aa, Homo Sapiens
SATELMNIL

SEQ ID NO: 157301 - protein, 9 aa, Homo Sapiens
SATSVHTSV

SEQ ID NO: 157302 - protein, 9 aa, Homo Sapiens
SATYIAEEY

SEQ ID NO: 157303 - protein, 9 aa, Homo Sapiens
SAVAKALEH

SEQ ID NO: 157304 - protein, 9 aa, Homo Sapiens
SAVELVQEF

SEQ ID NO: 157305 - protein, 9 aa, Homo Sapiens
SAVEPINTF

SEQ ID NO: 157306 - protein, 9 aa, Homo Sapiens
SAVPSTSTM

SEQ ID NO: 157307 - protein, 9 aa, Homo Sapiens
SAVQDISSH

SEQ ID NO: 157308 - protein, 9 aa, Homo Sapiens
SAYAQIVQF

SEQ ID NO: 157309 - protein, 9 aa, Homo Sapiens
SAYQHPASF

SEQ ID NO: 157310 - protein, 9 aa, Homo Sapiens
SAYQHPTTF

SEQ ID NO: 157311 - protein, 9 aa, Homo Sapiens
SAYQSITHY

SEQ ID NO: 157312 - protein, 9 aa, Homo Sapiens
SGGPGPRVY

SEQ ID NO: 157313 - protein, 9 aa, Homo Sapiens
SGPGPAAAL

SEQ ID NO: 157314 - protein, 9 aa, Homo Sapiens
SGPVPGTAI

SEQ ID NO: 157315 - protein, 9 aa, Homo Sapiens
SIESIHSEM

SEQ ID NO: 157316 - protein, 9 aa, Homo Sapiens
SIIDTPGIL

SEQ ID NO: 157317 - protein, 9 aa, Homo Sapiens
SIIKPQNTY

SEQ ID NO: 157318 - protein, 9 aa, Homo Sapiens
SIKEPVSTL

SEQ ID NO: 157319 - protein, 9 aa, Homo Sapiens
SINGAITQF

SEQ ID NO: 157320 - protein, 9 aa, Homo Sapiens
SIPDFPMHL

SEQ ID NO: 157321 - protein, 9 aa, Homo Sapiens
SIPENVSTH

SEQ ID NO: 157322 - protein, 9 aa, Homo Sapiens
SIRDGVRAY

SEQ ID NO: 157323 - protein, 9 aa, Homo Sapiens
SIREAGGAF

SEQ ID NO: 157324 - protein, 9 aa, Homo Sapiens
SIRPGLSPY

SEQ ID NO: 157325 - protein, 9 aa, Homo Sapiens
SIRQQILEH

SEQ ID NO: 157326 - protein, 9 aa, Homo Sapiens
SLKDPSNNF

SEQ ID NO: 157327 - protein, 9 aa, Homo Sapiens
SLKTPGTSL

SEQ ID NO: 157328 - protein, 9 aa, Homo Sapiens
SLPSFPSTL

SEQ ID NO: 157329 - protein, 9 aa, Homo Sapiens
SLRPDRPLH

SEQ ID NO: 157330 - protein, 9 aa, Homo Sapiens
SQANIAQVL

SEQ ID NO: 157331 - protein, 9 aa, Homo Sapiens
SQYPFPVTL

SEQ ID NO: 157332 - protein, 9 aa, Homo Sapiens
SQYQGVVVY

SEQ ID NO: 157333 - protein, 9 aa, Homo Sapiens
SSFDMAQVF

SEQ ID NO: 157334 - protein, 9 aa, Homo Sapiens
SSFPTVVIY

SEQ ID NO: 157335 - protein, 9 aa, Homo Sapiens
SSHVTNVSF

SEQ ID NO: 157336 - protein, 9 aa, Homo Sapiens
SSIGKLSEY

SEQ ID NO: 157337 - protein, 9 aa, Homo Sapiens
SSKEGGVTF

SEQ ID NO: 157338 - protein, 9 aa, Homo Sapiens
SSKEPAMSM

SEQ ID NO: 157339 - protein, 9 aa, Homo Sapiens
SSKEPPSAY

SEQ ID NO: 157340 - protein, 9 aa, Homo Sapiens
SSKEPSNSL

SEQ ID NO: 157341 - protein, 9 aa, Homo Sapiens
SSKPATSTF

SEQ ID NO: 157342 - protein, 9 aa, Homo Sapiens
SSMKPTLSH

SEQ ID NO: 157343 - protein, 9 aa, Homo Sapiens
SSRDPGTHF

SEQ ID NO: 157344 - protein, 9 aa, Homo Sapiens
SSSPVVVQH

SEQ ID NO: 157345 - protein, 9 aa, Homo Sapiens
SSVEVRMEF

SEQ ID NO: 157346 - protein, 9 aa, Homo Sapiens
SSYPNPVAH

SEQ ID NO: 157347 - protein, 9 aa, Homo Sapiens
STFLSQTTY

SEQ ID NO: 157348 - protein, 9 aa, Homo Sapiens
STHVTISTY

SEQ ID NO: 157349 - protein, 9 aa, Homo Sapiens
STKEPGRTL

SEQ ID NO: 157350 - protein, 9 aa, Homo Sapiens
STPDHTSTL

SEQ ID NO: 157351 - protein, 9 aa, Homo Sapiens
STVEVTNTF

SEQ ID NO: 157352 - protein, 9 aa, Homo Sapiens
SVHQPGSHY

SEQ ID NO: 157353 - protein, 9 aa, Homo Sapiens
SVIATIQEY

SEQ ID NO: 157354 - protein, 9 aa, Homo Sapiens
SVIDSPGIL

SEQ ID NO: 157355 - protein, 9 aa, Homo Sapiens
SVIDVKTTM

SEQ ID NO: 157356 - protein, 9 aa, Homo Sapiens
SVIESHTEF

SEQ ID NO: 157357 - protein, 9 aa, Homo Sapiens
SVINPGAIY

SEQ ID NO: 157358 - protein, 9 aa, Homo Sapiens
SVKEWTITY

SEQ ID NO: 157359 - protein, 9 aa, Homo Sapiens
SVKPASSSF

SEQ ID NO: 157360 - protein, 9 aa, Homo Sapiens
SVKSPNQSL

SEQ ID NO: 157361 - protein, 9 aa, Homo Sapiens
SVKWPNSVM

SEQ ID NO: 157362 - protein, 9 aa, Homo Sapiens
SVNGFISTL

SEQ ID NO: 157363 - protein, 9 aa, Homo Sapiens
SVPAFASSL

SEQ ID NO: 157364 - protein, 9 aa, Homo Sapiens
SVPSAVSSL

SEQ ID NO: 157365 - protein, 9 aa, Homo Sapiens
SVRKDIESY

SEQ ID NO: 157366 - protein, 9 aa, Homo Sapiens
SVRSNLTSF

SEQ ID NO: 157367 - protein, 9 aa, Homo Sapiens
TAAAVGAVF

SEQ ID NO: 157368 - protein, 9 aa, Homo Sapiens
TAADIFKQY

SEQ ID NO: 157369 - protein, 9 aa, Homo Sapiens
TAADLGSVV

SEQ ID NO: 157370 - protein, 9 aa, Homo Sapiens
TAADLVPIF

SEQ ID NO: 157371 - protein, 9 aa, Homo Sapiens
TAADTVIIY

SEQ ID NO: 157372 - protein, 9 aa, Homo Sapiens
TAAGVTSIV

SEQ ID NO: 157373 - protein, 9 aa, Homo Sapiens
TAAPPAQPL

SEQ ID NO: 157374 - protein, 9 aa, Homo Sapiens
TAAPTGTTI

SEQ ID NO: 157375 - protein, 9 aa, Homo Sapiens
TAAPTIGVL

SEQ ID NO: 157376 - protein, 9 aa, Homo Sapiens
TAAPVPTTL

SEQ ID NO: 157377 - protein, 9 aa, Homo Sapiens
TAARAWALF

SEQ ID NO: 157378 - protein, 9 aa, Homo Sapiens
TAAWTGTTF

SEQ ID NO: 157379 - protein, 9 aa, Homo Sapiens
TAFPEASFL

SEQ ID NO: 157380 - protein, 9 aa, Homo Sapiens
TAFPQRTEL

SEQ ID NO: 157381 - protein, 9 aa, Homo Sapiens
TAIEKPEEF

SEQ ID NO: 157382 - protein, 9 aa, Homo Sapiens
TAIESGQHY

SEQ ID NO: 157383 - protein, 9 aa, Homo Sapiens
TAIRALETY

SEQ ID NO: 157384 - protein, 9 aa, Homo Sapiens
TAISLCQTF

SEQ ID NO: 157385 - protein, 9 aa, Homo Sapiens
TAISRYMEL

SEQ ID NO: 157386 - protein, 9 aa, Homo Sapiens
TAITRAQSL

SEQ ID NO: 157387 - protein, 9 aa, Homo Sapiens
TAKDPSVSI

SEQ ID NO: 157388 - protein, 9 aa, Homo Sapiens
TAKEAGCRF

SEQ ID NO: 157389 - protein, 9 aa, Homo Sapiens
TAKEIIQHF

SEQ ID NO: 157390 - protein, 9 aa, Homo Sapiens
TAKELNVSF

SEQ ID NO: 157391 - protein, 9 aa, Homo Sapiens
TAKGPGSGF

SEQ ID NO: 157392 - protein, 9 aa, Homo Sapiens
TAKPGVSTV

SEQ ID NO: 157393 - protein, 9 aa, Homo Sapiens
TAKRSGAVF

SEQ ID NO: 157394 - protein, 9 aa, Homo Sapiens
TAKSATWTY

SEQ ID NO: 157395 - protein, 9 aa, Homo Sapiens
TAKSPATCY

SEQ ID NO: 157396 - protein, 9 aa, Homo Sapiens
TAKSVTCTY

SEQ ID NO: 157397 - protein, 9 aa, Homo Sapiens
TAMFIASKY

SEQ ID NO: 157398 - protein, 9 aa, Homo Sapiens
TAQDLVQHF

SEQ ID NO: 157399 - protein, 9 aa, Homo Sapiens
TARYIYISY

SEQ ID NO: 157400 - protein, 9 aa, Homo Sapiens
TASAVVQHM

SEQ ID NO: 157401 - protein, 9 aa, Homo Sapiens
TASEIGSAF

SEQ ID NO: 157402 - protein, 9 aa, Homo Sapiens
TASGVFSKF

SEQ ID NO: 157403 - protein, 9 aa, Homo Sapiens
TASPVAVSL

SEQ ID NO: 157404 - protein, 9 aa, Homo Sapiens
TASPVIKAV

SEQ ID NO: 157405 - protein, 9 aa, Homo Sapiens
TAVIPTNVF

SEQ ID NO: 157406 - protein, 9 aa, Homo Sapiens
TAVYKVSEY

SEQ ID NO: 157407 - protein, 9 aa, Homo Sapiens
TAYAYATVL

SEQ ID NO: 157408 - protein, 9 aa, Homo Sapiens
TAYPASIVH

SEQ ID NO: 157409 - protein, 9 aa, Homo Sapiens
TAYPGQTQY

SEQ ID NO: 157410 - protein, 9 aa, Homo Sapiens
TGIPGLEQL

SEQ ID NO: 157411 - protein, 9 aa, Homo Sapiens
TGMVPGSEF

SEQ ID NO: 157412 - protein, 9 aa, Homo Sapiens
TIAKPTTHF

SEQ ID NO: 157413 - protein, 9 aa, Homo Sapiens
TIIEATHVL

SEQ ID NO: 157414 - protein, 9 aa, Homo Sapiens
TIINLAQNF

SEQ ID NO: 157415 - protein, 9 aa, Homo Sapiens
TIKDCATVF

SEQ ID NO: 157416 - protein, 9 aa, Homo Sapiens
TIKDPPTSA

SEQ ID NO: 157417 - protein, 9 aa, Homo Sapiens
TIKDVSLCF

SEQ ID NO: 157418 - protein, 9 aa, Homo Sapiens
TIKSATISY

SEQ ID NO: 157419 - protein, 9 aa, Homo Sapiens
TIMAHVTEF

SEQ ID NO: 157420 - protein, 9 aa, Homo Sapiens
TINEIEDTF

SEQ ID NO: 157421 - protein, 9 aa, Homo Sapiens
TINGKIAVL

SEQ ID NO: 157422 - protein, 9 aa, Homo Sapiens
TLITGLEEY

SEQ ID NO: 157423 - protein, 9 aa, Homo Sapiens
TLKDHIMSH

SEQ ID NO: 157424 - protein, 9 aa, Homo Sapiens
TLKEAGTHY

SEQ ID NO: 157425 - protein, 9 aa, Homo Sapiens
TLKTPGKSF

SEQ ID NO: 157426 - protein, 9 aa, Homo Sapiens
TMKDFNHSY

SEQ ID NO: 157427 - protein, 9 aa, Homo Sapiens
TSAPTGHTF

SEQ ID NO: 157428 - protein, 9 aa, Homo Sapiens
TSFPHESTF

SEQ ID NO: 157429 - protein, 9 aa, Homo Sapiens
TSKVPSAPH

SEQ ID NO: 157430 - protein, 9 aa, Homo Sapiens
TTFPRPVTV

SEQ ID NO: 157431 - protein, 9 aa, Homo Sapiens
TTIDVRTTF

SEQ ID NO: 157432 - protein, 9 aa, Homo Sapiens
TTKAPTGPF

SEQ ID NO: 157433 - protein, 9 aa, Homo Sapiens
TTYPNTYIF

SEQ ID NO: 157434 - protein, 9 aa, Homo Sapiens
TVIDKLVVH

SEQ ID NO: 157435 - protein, 9 aa, Homo Sapiens
TVIDSQTHY

SEQ ID NO: 157436 - protein, 9 aa, Homo Sapiens
TVKDSRTVY

SEQ ID NO: 157437 - protein, 9 aa, Homo Sapiens
TVKPPTSVA

SEQ ID NO: 157438 - protein, 9 aa, Homo Sapiens
TVRDFTQVF

SEQ ID NO: 157439 - protein, 9 aa, Homo Sapiens
TVRDHVHCL

SEQ ID NO: 157440 - protein, 9 aa, Homo Sapiens
TVYDKPASF

SEQ ID NO: 157441 - protein, 9 aa, Homo Sapiens
VAAAPGTPA

SEQ ID NO: 157442 - protein, 9 aa, Homo Sapiens
VAAAVSGVY

SEQ ID NO: 157443 - protein, 9 aa, Homo Sapiens
VAADAVASL

SEQ ID NO: 157444 - protein, 9 aa, Homo Sapiens
VAAEAFSEL

SEQ ID NO: 157445 - protein, 9 aa, Homo Sapiens
VAAEWRSTF

SEQ ID NO: 157446 - protein, 9 aa, Homo Sapiens
VAAGGHITF

SEQ ID NO: 157447 - protein, 9 aa, Homo Sapiens
VAALPGIVH

SEQ ID NO: 157448 - protein, 9 aa, Homo Sapiens
VAAPASLSL

SEQ ID NO: 157449 - protein, 9 aa, Homo Sapiens
VAAPLFELY

SEQ ID NO: 157450 - protein, 9 aa, Homo Sapiens
VAASNIVQM

SEQ ID NO: 157451 - protein, 9 aa, Homo Sapiens
VADPYVVIM

SEQ ID NO: 157452 - protein, 9 aa, Homo Sapiens
VAFGHHAKF

SEQ ID NO: 157453 - protein, 9 aa, Homo Sapiens
VAFGSHMSF

SEQ ID NO: 157454 - protein, 9 aa, Homo Sapiens
VAFKKTFSY

SEQ ID NO: 157455 - protein, 9 aa, Homo Sapiens
VAFNWIIVH

SEQ ID NO: 157456 - protein, 9 aa, Homo Sapiens
VAFPSSSVY

SEQ ID NO: 157457 - protein, 9 aa, Homo Sapiens
VAFPVGNAF

SEQ ID NO: 157458 - protein, 9 aa, Homo Sapiens
VAFQNPQTH

SEQ ID NO: 157459 - protein, 9 aa, Homo Sapiens
VAFSPVTEL

SEQ ID NO: 157460 - protein, 9 aa, Homo Sapiens
VAGAHVVIH

SEQ ID NO: 157461 - protein, 9 aa, Homo Sapiens
VAGPVGGSL

SEQ ID NO: 157462 - protein, 9 aa, Homo Sapiens
VAHSPPSTL

SEQ ID NO: 157463 - protein, 9 aa, Homo Sapiens
VAINHIVDF

SEQ ID NO: 157464 - protein, 9 aa, Homo Sapiens
VAINLIVQH

SEQ ID NO: 157465 - protein, 9 aa, Homo Sapiens
VAIPSYICY

SEQ ID NO: 157466 - protein, 9 aa, Homo Sapiens
VAIQSVRCY

SEQ ID NO: 157467 - protein, 9 aa, Homo Sapiens
VAKAPSLTF

SEQ ID NO: 157468 - protein, 9 aa, Homo Sapiens
VAKAPSQAL

SEQ ID NO: 157469 - protein, 9 aa, Homo Sapiens
VAKAVTQAL

SEQ ID NO: 157470 - protein, 9 aa, Homo Sapiens
VAKGPSHSL

SEQ ID NO: 157471 - protein, 9 aa, Homo Sapiens
VAKHPAGSF

SEQ ID NO: 157472 - protein, 9 aa, Homo Sapiens
VAKIVAETM

SEQ ID NO: 157473 - protein, 9 aa, Homo Sapiens
VAKLILVNF

SEQ ID NO: 157474 - protein, 9 aa, Homo Sapiens
VAKLTGHSY

SEQ ID NO: 157475 - protein, 9 aa, Homo Sapiens
VAKMGITEY

SEQ ID NO: 157476 - protein, 9 aa, Homo Sapiens
VAKPPGWSA

SEQ ID NO: 157477 - protein, 9 aa, Homo Sapiens
VAKPPVMSF

SEQ ID NO: 157478 - protein, 9 aa, Homo Sapiens
VAKSKLREL

SEQ ID NO: 157479 - protein, 9 aa, Homo Sapiens
VAKTLGREF

SEQ ID NO: 157480 - protein, 9 aa, Homo Sapiens
VAKTNTVSY

SEQ ID NO: 157481 - protein, 9 aa, Homo Sapiens
VAKTPRNTY

SEQ ID NO: 157482 - protein, 9 aa, Homo Sapiens
VAKWATVTF

SEQ ID NO: 157483 - protein, 9 aa, Homo Sapiens
VAKWTGDFF

SEQ ID NO: 157484 - protein, 9 aa, Homo Sapiens
VALHSAVSA

SEQ ID NO: 157485 - protein, 9 aa, Homo Sapiens
VALLRVTPF

SEQ ID NO: 157486 - protein, 9 aa, Homo Sapiens
VAMKFAQVF

SEQ ID NO: 157487 - protein, 9 aa, Homo Sapiens
VANETGAFF

SEQ ID NO: 157488 - protein, 9 aa, Homo Sapiens
VANPNSAIF

SEQ ID NO: 157489 - protein, 9 aa, Homo Sapiens
VANSIHSLF

SEQ ID NO: 157490 - protein, 9 aa, Homo Sapiens
VANTMRTSL

SEQ ID NO: 157491 - protein, 9 aa, Homo Sapiens
VAPAAASSL

SEQ ID NO: 157492 - protein, 9 aa, Homo Sapiens
VAPPGCSHL

SEQ ID NO: 157493 - protein, 9 aa, Homo Sapiens
VAQELPTTL

SEQ ID NO: 157494 - protein, 9 aa, Homo Sapiens
VAQEPVNTL

SEQ ID NO: 157495 - protein, 9 aa, Homo Sapiens
VAQKPRSHF

SEQ ID NO: 157496 - protein, 9 aa, Homo Sapiens
VARDLRAEF

SEQ ID NO: 157497 - protein, 9 aa, Homo Sapiens
VARGEIARF

SEQ ID NO: 157498 - protein, 9 aa, Homo Sapiens
VARGNLGVY

SEQ ID NO: 157499 - protein, 9 aa, Homo Sapiens
VARLIAIFF

SEQ ID NO: 157500 - protein, 9 aa, Homo Sapiens
VARPDVVEM

SEQ ID NO: 157501 - protein, 9 aa, Homo Sapiens
VARPPGQDF

SEQ ID NO: 157502 - protein, 9 aa, Homo Sapiens
VARSNILTL

SEQ ID NO: 157503 - protein, 9 aa, Homo Sapiens
VASAVFGVI

SEQ ID NO: 157504 - protein, 9 aa, Homo Sapiens
VASEIMAVL

SEQ ID NO: 157505 - protein, 9 aa, Homo Sapiens
VASETGHVY

SEQ ID NO: 157506 - protein, 9 aa, Homo Sapiens
VASEYPVIL

SEQ ID NO: 157507 - protein, 9 aa, Homo Sapiens
VASSILSHI

SEQ ID NO: 157508 - protein, 9 aa, Homo Sapiens
VASSLYDIL

SEQ ID NO: 157509 - protein, 9 aa, Homo Sapiens
VASSVNTEF

SEQ ID NO: 157510 - protein, 9 aa, Homo Sapiens
VASTITGVM

SEQ ID NO: 157511 - protein, 9 aa, Homo Sapiens
VATDFFTVL

SEQ ID NO: 157512 - protein, 9 aa, Homo Sapiens
VATSRIIKY

SEQ ID NO: 157513 - protein, 9 aa, Homo Sapiens
VAVCRIPVL

SEQ ID NO: 157514 - protein, 9 aa, Homo Sapiens
VAVDGINAL

SEQ ID NO: 157515 - protein, 9 aa, Homo Sapiens
VAVDPTEEY

SEQ ID NO: 157516 - protein, 9 aa, Homo Sapiens
VAVEPGAAV

SEQ ID NO: 157517 - protein, 9 aa, Homo Sapiens
VAVEVVTTM

SEQ ID NO: 157518 - protein, 9 aa, Homo Sapiens
VAVHVFSEF

SEQ ID NO: 157519 - protein, 9 aa, Homo Sapiens
VAVHVVDFF

SEQ ID NO: 157520 - protein, 9 aa, Homo Sapiens
VAVNKPAEF

SEQ ID NO: 157521 - protein, 9 aa, Homo Sapiens
VAVPVAVTF

SEQ ID NO: 157522 - protein, 9 aa, Homo Sapiens
VAVSMLNVY

SEQ ID NO: 157523 - protein, 9 aa, Homo Sapiens
VAWVGQQVH

SEQ ID NO: 157524 - protein, 9 aa, Homo Sapiens
VAYDSKQYY

SEQ ID NO: 157525 - protein, 9 aa, Homo Sapiens
VAYGKGTYF

SEQ ID NO: 157526 - protein, 9 aa, Homo Sapiens
VAYMNPIAM

SEQ ID NO: 157527 - protein, 9 aa, Homo Sapiens
VAYPCAILY

SEQ ID NO: 157528 - protein, 9 aa, Homo Sapiens
VAYQHAFLY

SEQ ID NO: 157529 - protein, 9 aa, Homo Sapiens
VAYSHPTTV

SEQ ID NO: 157530 - protein, 9 aa, Homo Sapiens
VAYVSSVAL

SEQ ID NO: 157531 - protein, 9 aa, Homo Sapiens
VGAPVEVTH

SEQ ID NO: 157532 - protein, 9 aa, Homo Sapiens
VGIDLGTTY

SEQ ID NO: 157533 - protein, 9 aa, Homo Sapiens
VGVPSAPVL

SEQ ID NO: 157534 - protein, 9 aa, Homo Sapiens
VIAPIISNF

SEQ ID NO: 157535 - protein, 9 aa, Homo Sapiens
VIFAGGQAY

SEQ ID NO: 157536 - protein, 9 aa, Homo Sapiens
VIGDVIRVY

SEQ ID NO: 157537 - protein, 9 aa, Homo Sapiens
VIIDDRHVY

SEQ ID NO: 157538 - protein, 9 aa, Homo Sapiens
VIIDNLQFM

SEQ ID NO: 157539 - protein, 9 aa, Homo Sapiens
VIIGARAEM

SEQ ID NO: 157540 - protein, 9 aa, Homo Sapiens
VIIKGTQVY

SEQ ID NO: 157541 - protein, 9 aa, Homo Sapiens
VIKDAIASL

SEQ ID NO: 157542 - protein, 9 aa, Homo Sapiens
VIKEITQEM

SEQ ID NO: 157543 - protein, 9 aa, Homo Sapiens
VIKEKGLEH

SEQ ID NO: 157544 - protein, 9 aa, Homo Sapiens
VIKEQNREL

SEQ ID NO: 157545 - protein, 9 aa, Homo Sapiens
VIKESGPPH

SEQ ID NO: 157546 - protein, 9 aa, Homo Sapiens
VIKETQERY

SEQ ID NO: 157547 - protein, 9 aa, Homo Sapiens
VIKETTREM

SEQ ID NO: 157548 - protein, 9 aa, Homo Sapiens
VILPPLSPY

SEQ ID NO: 157549 - protein, 9 aa, Homo Sapiens
VINGNIKTV

SEQ ID NO: 157550 - protein, 9 aa, Homo Sapiens
VIPENTVIY

SEQ ID NO: 157551 - protein, 9 aa, Homo Sapiens
VIRDEVEKY

SEQ ID NO: 157552 - protein, 9 aa, Homo Sapiens
VIRDFAGPY

SEQ ID NO: 157553 - protein, 9 aa, Homo Sapiens
VIRELKEQY

SEQ ID NO: 157554 - protein, 9 aa, Homo Sapiens
VIRGNIVKH

SEQ ID NO: 157555 - protein, 9 aa, Homo Sapiens
VIRHITVVH

SEQ ID NO: 157556 - protein, 9 aa, Homo Sapiens
VIVSTRSPY

SEQ ID NO: 157557 - protein, 9 aa, Homo Sapiens
VLGPAEAHY

SEQ ID NO: 157558 - protein, 9 aa, Homo Sapiens
VLIDVGTGY

SEQ ID NO: 157559 - protein, 9 aa, Homo Sapiens
VLREIAEEY

SEQ ID NO: 157560 - protein, 9 aa, Homo Sapiens
VMINKATPY

SEQ ID NO: 157561 - protein, 9 aa, Homo Sapiens
VQGPVGTDF

SEQ ID NO: 157562 - protein, 9 aa, Homo Sapiens
VSAGIQTSF

SEQ ID NO: 157563 - protein, 9 aa, Homo Sapiens
VSHIMLESY

SEQ ID NO: 157564 - protein, 9 aa, Homo Sapiens
VSHLIATEY

SEQ ID NO: 157565 - protein, 9 aa, Homo Sapiens
VSKPSAPVF

SEQ ID NO: 157566 - protein, 9 aa, Homo Sapiens
VSPDAKTSL

SEQ ID NO: 157567 - protein, 9 aa, Homo Sapiens
VSRDTIAIH

SEQ ID NO: 157568 - protein, 9 aa, Homo Sapiens
VSRVPTRSL

SEQ ID NO: 157569 - protein, 9 aa, Homo Sapiens
VSSDVQSVF

SEQ ID NO: 157570 - protein, 9 aa, Homo Sapiens
VSSPTVQVF

SEQ ID NO: 157571 - protein, 9 aa, Homo Sapiens
VSTEPGKEY

SEQ ID NO: 157572 - protein, 9 aa, Homo Sapiens
VSVPFPVTH

SEQ ID NO: 157573 - protein, 9 aa, Homo Sapiens
VTFEKQWFY

SEQ ID NO: 157574 - protein, 9 aa, Homo Sapiens
VTKDPGVGM

SEQ ID NO: 157575 - protein, 9 aa, Homo Sapiens
VTKGNIAQM

SEQ ID NO: 157576 - protein, 9 aa, Homo Sapiens
VTKPANSVF

SEQ ID NO: 157577 - protein, 9 aa, Homo Sapiens
VTKPVGGNY

SEQ ID NO: 157578 - protein, 9 aa, Homo Sapiens
VTNTIISHY

SEQ ID NO: 157579 - protein, 9 aa, Homo Sapiens
VTQIPQEEH

SEQ ID NO: 157580 - protein, 9 aa, Homo Sapiens
VTRPVPLEH

SEQ ID NO: 157581 - protein, 9 aa, Homo Sapiens
VTSPVLVIH

SEQ ID NO: 157582 - protein, 9 aa, Homo Sapiens
VTYVPVTTF

SEQ ID NO: 157583 - protein, 9 aa, Homo Sapiens
VVAGIKEYF

SEQ ID NO: 157584 - protein, 9 aa, Homo Sapiens
VVAPITTGY

SEQ ID NO: 157585 - protein, 9 aa, Homo Sapiens
VVIRQRKSY

SEQ ID NO: 157586 - protein, 9 aa, Homo Sapiens
VVITKVVTH

SEQ ID NO: 157587 - protein, 9 aa, Homo Sapiens
VVKMPSGEF

SEQ ID NO: 157588 - protein, 9 aa, Homo Sapiens
VVKPPGQDL

SEQ ID NO: 157589 - protein, 9 aa, Homo Sapiens
VVKPPGSSL

SEQ ID NO: 157590 - protein, 9 aa, Homo Sapiens
VVNGKVEYF

SEQ ID NO: 157591 - protein, 9 aa, Homo Sapiens
VVPQFVVFY

SEQ ID NO: 157592 - protein, 9 aa, Homo Sapiens
VVQEPGQVF

SEQ ID NO: 157593 - protein, 9 aa, Homo Sapiens
VVYENVSHF

SEQ ID NO: 157594 - protein, 9 aa, Homo Sapiens
VVYPWTQRF

SEQ ID NO: 157595 - protein, 9 aa, Homo Sapiens
WARPLSVSF

SEQ ID NO: 157596 - protein, 9 aa, Homo Sapiens
YAAASHSYY

SEQ ID NO: 157597 - protein, 9 aa, Homo Sapiens
YAAGALTVH

SEQ ID NO: 157598 - protein, 9 aa, Homo Sapiens
YAAGVHSVL

SEQ ID NO: 157599 - protein, 9 aa, Homo Sapiens
YAALHGEFY

SEQ ID NO: 157600 - protein, 9 aa, Homo Sapiens
YAALPGQQH

SEQ ID NO: 157601 - protein, 9 aa, Homo Sapiens
YAANLKNVM

SEQ ID NO: 157602 - protein, 9 aa, Homo Sapiens
YAANPGQLF

SEQ ID NO: 157603 - protein, 9 aa, Homo Sapiens
YAAQNRQEF

SEQ ID NO: 157604 - protein, 9 aa, Homo Sapiens
YAFDFARQS

SEQ ID NO: 157605 - protein, 9 aa, Homo Sapiens
YAFGGGCEL

SEQ ID NO: 157606 - protein, 9 aa, Homo Sapiens
YAFGSCINH

SEQ ID NO: 157607 - protein, 9 aa, Homo Sapiens
YAFNGTQRF

SEQ ID NO: 157608 - protein, 9 aa, Homo Sapiens
YAFPKAVSV

SEQ ID NO: 157609 - protein, 9 aa, Homo Sapiens
YAFPKAVTV

SEQ ID NO: 157610 - protein, 9 aa, Homo Sapiens
YAFPKSITV

SEQ ID NO: 157611 - protein, 9 aa, Homo Sapiens
YAFPLAHSL

SEQ ID NO: 157612 - protein, 9 aa, Homo Sapiens
YAFPVGLTH

SEQ ID NO: 157613 - protein, 9 aa, Homo Sapiens
YAFVRPVIL

SEQ ID NO: 157614 - protein, 9 aa, Homo Sapiens
YAHFPINVV

SEQ ID NO: 157615 - protein, 9 aa, Homo Sapiens
YAIDNPLHY

SEQ ID NO: 157616 - protein, 9 aa, Homo Sapiens
YAISKPEVL

SEQ ID NO: 157617 - protein, 9 aa, Homo Sapiens
YAKAGCQVV

SEQ ID NO: 157618 - protein, 9 aa, Homo Sapiens
YAKDDPLEF

SEQ ID NO: 157619 - protein, 9 aa, Homo Sapiens
YAKDGRVSY

SEQ ID NO: 157620 - protein, 9 aa, Homo Sapiens
YAKDMLTSL

SEQ ID NO: 157621 - protein, 9 aa, Homo Sapiens
YAKDYTKAL

SEQ ID NO: 157622 - protein, 9 aa, Homo Sapiens
YAKEAQQSL

SEQ ID NO: 157623 - protein, 9 aa, Homo Sapiens
YAKIVEIPF

SEQ ID NO: 157624 - protein, 9 aa, Homo Sapiens
YAKNNIPII

SEQ ID NO: 157625 - protein, 9 aa, Homo Sapiens
YAMDELRSL

SEQ ID NO: 157626 - protein, 9 aa, Homo Sapiens
YANAKIYKL

SEQ ID NO: 157627 - protein, 9 aa, Homo Sapiens
YANDFASEY

SEQ ID NO: 157628 - protein, 9 aa, Homo Sapiens
YANEVGEAF

SEQ ID NO: 157629 - protein, 9 aa, Homo Sapiens
YANSKAVTL

SEQ ID NO: 157630 - protein, 9 aa, Homo Sapiens
YARDETEFY

SEQ ID NO: 157631 - protein, 9 aa, Homo Sapiens
YARTDGKVF

SEQ ID NO: 157632 - protein, 9 aa, Homo Sapiens
YARVVGSEY

SEQ ID NO: 157633 - protein, 9 aa, Homo Sapiens
YASDCASFF

SEQ ID NO: 157634 - protein, 9 aa, Homo Sapiens
YASGAAAYY

SEQ ID NO: 157635 - protein, 9 aa, Homo Sapiens
YASGKISQF

SEQ ID NO: 157636 - protein, 9 aa, Homo Sapiens
YASNITSVL

SEQ ID NO: 157637 - protein, 9 aa, Homo Sapiens
YASSPGGVY

SEQ ID NO: 157638 - protein, 9 aa, Homo Sapiens
YASSPGMSL

SEQ ID NO: 157639 - protein, 9 aa, Homo Sapiens
YATFIVTNY

SEQ ID NO: 157640 - protein, 9 aa, Homo Sapiens
YATIILSKM

SEQ ID NO: 157641 - protein, 9 aa, Homo Sapiens
YAVAHAVTE

SEQ ID NO: 157642 - protein, 9 aa, Homo Sapiens
YAVDRAITH

SEQ ID NO: 157643 - protein, 9 aa, Homo Sapiens
YAVPALEAH

SEQ ID NO: 157644 - protein, 9 aa, Homo Sapiens
YAYEKPHVV

SEQ ID NO: 157645 - protein, 9 aa, Homo Sapiens
YAYPATAAA

SEQ ID NO: 157646 - protein, 9 aa, Homo Sapiens
YGAEALERM

SEQ ID NO: 157647 - protein, 9 aa, Homo Sapiens
YGYEHILTL

SEQ ID NO: 157648 - protein, 9 aa, Homo Sapiens
YGYGHESEL

SEQ ID NO: 157649 - protein, 9 aa, Homo Sapiens
YIAAFLSHF

SEQ ID NO: 157650 - protein, 9 aa, Homo Sapiens
YIISGLTGF

SEQ ID NO: 157651 - protein, 9 aa, Homo Sapiens
YIKDRTLPF

SEQ ID NO: 157652 - protein, 9 aa, Homo Sapiens
YIKEPKSVF

SEQ ID NO: 157653 - protein, 9 aa, Homo Sapiens
YIKEYVTCH

SEQ ID NO: 157654 - protein, 9 aa, Homo Sapiens
YIRDLALEY

SEQ ID NO: 157655 - protein, 9 aa, Homo Sapiens
YIRGGIVSQ

SEQ ID NO: 157656 - protein, 9 aa, Homo Sapiens
YISDHMKVH

SEQ ID NO: 157657 - protein, 9 aa, Homo Sapiens
YLADIFTKL

SEQ ID NO: 157658 - protein, 9 aa, Homo Sapiens
YLAPHVRTL

SEQ ID NO: 157659 - protein, 9 aa, Homo Sapiens
YLLPHILVY

SEQ ID NO: 157660 - protein, 9 aa, Homo Sapiens
YNFEKPVVM

SEQ ID NO: 157661 - protein, 9 aa, Homo Sapiens
YQADIERMY

SEQ ID NO: 157662 - protein, 9 aa, Homo Sapiens
YQFTGIKKY

SEQ ID NO: 157663 - protein, 9 aa, Homo Sapiens
YSADGHSIL

SEQ ID NO: 157664 - protein, 9 aa, Homo Sapiens
YSFDPVGSY

SEQ ID NO: 157665 - protein, 9 aa, Homo Sapiens
YSGARPLSH

SEQ ID NO: 157666 - protein, 9 aa, Homo Sapiens
YSKDQLQTF

SEQ ID NO: 157667 - protein, 9 aa, Homo Sapiens
YSKLPGVSL

SEQ ID NO: 157668 - protein, 9 aa, Homo Sapiens
YSMISVVGF

SEQ ID NO: 157669 - protein, 9 aa, Homo Sapiens
YSNGFCTVY

SEQ ID NO: 157670 - protein, 9 aa, Homo Sapiens
YSRYPPREY

SEQ ID NO: 157671 - protein, 9 aa, Homo Sapiens
YTFGRIVIY

SEQ ID NO: 157672 - protein, 9 aa, Homo Sapiens
YTIENPRHF

SEQ ID NO: 157673 - protein, 9 aa, Homo Sapiens
YTKAWEEYY

SEQ ID NO: 157674 - protein, 9 aa, Homo Sapiens
YTNGKCVIL

SEQ ID NO: 157675 - protein, 9 aa, Homo Sapiens
YTRPAISSF

SEQ ID NO: 157676 - protein, 9 aa, Homo Sapiens
YTRPGLPTF

SEQ ID NO: 157677 - protein, 9 aa, Homo Sapiens
YTVGGLETF

SEQ ID NO: 157678 - protein, 9 aa, Homo Sapiens
YVHETLTVY

SEQ ID NO: 157679 - protein, 9 aa, Homo Sapiens
YVIQHVLEH

SEQ ID NO: 157680 - protein, 9 aa, Homo Sapiens
YVKGGLSTF

SEQ ID NO: 157681 - protein, 9 aa, Homo Sapiens
YVTTSTRTY

SEQ ID NO: 157682 - protein, 10 aa, Homo Sapiens
AAAAAAAAAY

SEQ ID NO: 157683 - protein, 10 aa, Homo Sapiens
AAAAAAAAMS

SEQ ID NO: 157684 - protein, 10 aa, Homo Sapiens
AAAAAAAAQY

SEQ ID NO: 157685 - protein, 10 aa, Homo Sapiens
AAAAAAAATM

SEQ ID NO: 157686 - protein, 10 aa, Homo Sapiens
AAAAAAQSVY

SEQ ID NO: 157687 - protein, 10 aa, Homo Sapiens
AAAEAAAAVV

SEQ ID NO: 157688 - protein, 10 aa, Homo Sapiens
AAAEADRTLF

SEQ ID NO: 157689 - protein, 10 aa, Homo Sapiens
AAAGAAATHL

SEQ ID NO: 157690 - protein, 10 aa, Homo Sapiens
AAFDASRTSF

SEQ ID NO: 157691 - protein, 10 aa, Homo Sapiens
AAFGGHPQCL

SEQ ID NO: 157692 - protein, 10 aa, Homo Sapiens
AAFGGNPKSV

SEQ ID NO: 157693 - protein, 10 aa, Homo Sapiens
AAFKPTSQHY

SEQ ID NO: 157694 - protein, 10 aa, Homo Sapiens
AAIYLSRGFF

SEQ ID NO: 157695 - protein, 10 aa, Homo Sapiens
AAVSPSSVFY

SEQ ID NO: 157696 - protein, 10 aa, Homo Sapiens
AAWEPSKNTL

SEQ ID NO: 157697 - protein, 10 aa, Homo Sapiens
AAYGGYPTAH

SEQ ID NO: 157698 - protein, 10 aa, Homo Sapiens
AAYNGHCEAL

SEQ ID NO: 157699 - protein, 10 aa, Homo Sapiens
AAYYGNISHF

SEQ ID NO: 157700 - protein, 10 aa, Homo Sapiens
AGIEGPLLAS

SEQ ID NO: 157701 - protein, 10 aa, Homo Sapiens
APIRPDIVNF

SEQ ID NO: 157702 - protein, 10 aa, Homo Sapiens
ARAVATATMI

SEQ ID NO: 157703 - protein, 10 aa, Homo Sapiens
ASFDGRISVY

SEQ ID NO: 157704 - protein, 10 aa, Homo Sapiens
ATAAAAAAAF

SEQ ID NO: 157705 - protein, 10 aa, Homo Sapiens
ATFDASRTTF

SEQ ID NO: 157706 - protein, 10 aa, Homo Sapiens
CENVRDIPLL

SEQ ID NO: 157707 - protein, 10 aa, Homo Sapiens
EEQLQQIRAE

SEQ ID NO: 157708 - protein, 10 aa, Homo Sapiens
FAAVAAAAYY

SEQ ID NO: 157709 - protein, 10 aa, Homo Sapiens
FAFADAPNHY

SEQ ID NO: 157710 - protein, 10 aa, Homo Sapiens
FAIDPNEPTY

SEQ ID NO: 157711 - protein, 10 aa, Homo Sapiens
FAIGGIARTY

SEQ ID NO: 157712 - protein, 10 aa, Homo Sapiens
FAIGSQVSEH

SEQ ID NO: 157713 - protein, 10 aa, Homo Sapiens
FAKGPTLTVY

SEQ ID NO: 157714 - protein, 10 aa, Homo Sapiens
FAKTFVGTPY

SEQ ID NO: 157715 - protein, 10 aa, Homo Sapiens
FAVDLEHHSY

SEQ ID NO: 157716 - protein, 10 aa, Homo Sapiens
FAVDPRIITH

SEQ ID NO: 157717 - protein, 10 aa, Homo Sapiens
FAWEPNGSKF

SEQ ID NO: 157718 - protein, 10 aa, Homo Sapiens
FAYDPSNYEY

SEQ ID NO: 157719 - protein, 10 aa, Homo Sapiens
FAYGGHPYPF

SEQ ID NO: 157720 - protein, 10 aa, Homo Sapiens
FAYPNRPDVL

SEQ ID NO: 157721 - protein, 10 aa, Homo Sapiens
FIIDTRDAGY

SEQ ID NO: 157722 - protein, 10 aa, Homo Sapiens
FIMDTGNQRF

SEQ ID NO: 157723 - protein, 10 aa, Homo Sapiens
FIPSSVPATF

SEQ ID NO: 157724 - protein, 10 aa, Homo Sapiens
FIYDSVKVYF

SEQ ID NO: 157725 - protein, 10 aa, Homo Sapiens
FSFGGKLVTF

SEQ ID NO: 157726 - protein, 10 aa, Homo Sapiens
GAFDGRPADY

SEQ ID NO: 157727 - protein, 10 aa, Homo Sapiens
HAFDGRPSVA

SEQ ID NO: 157728 - protein, 10 aa, Homo Sapiens
HAFGGNKASY

SEQ ID NO: 157729 - protein, 10 aa, Homo Sapiens
HAYIFRPEVY

SEQ ID NO: 157730 - protein, 10 aa, Homo Sapiens
HGIDPTGTYH

SEQ ID NO: 157731 - protein, 10 aa, Homo Sapiens
HLPEHEVMPH

SEQ ID NO: 157732 - protein, 10 aa, Homo Sapiens
HVKDANGNSF

SEQ ID NO: 157733 - protein, 10 aa, Homo Sapiens
IAFDPRSAYY

SEQ ID NO: 157734 - protein, 10 aa, Homo Sapiens
IAFIPNDVYF

SEQ ID NO: 157735 - protein, 10 aa, Homo Sapiens
IAPDFPAQVL

SEQ ID NO: 157736 - protein, 10 aa, Homo Sapiens
IIIDGGNSEY

SEQ ID NO: 157737 - protein, 10 aa, Homo Sapiens
ILKSPGSVVF

SEQ ID NO: 157738 - protein, 10 aa, Homo Sapiens
ISFDGSYVNY

SEQ ID NO: 157739 - protein, 10 aa, Homo Sapiens
ITSEAPFLHY

SEQ ID NO: 157740 - protein, 10 aa, Homo Sapiens
IVKKPGNIYY

SEQ ID NO: 157741 - protein, 10 aa, Homo Sapiens
KAADFQLHTH

SEQ ID NO: 157742 - protein, 10 aa, Homo Sapiens
KAFISKVSTH

SEQ ID NO: 157743 - protein, 10 aa, Homo Sapiens
KAYDKAVASF

SEQ ID NO: 157744 - protein, 10 aa, Homo Sapiens
KIIETTGVHF

SEQ ID NO: 157745 - protein, 10 aa, Homo Sapiens
KIPNFWVTTF

SEQ ID NO: 157746 - protein, 10 aa, Homo Sapiens
KLFPGSPAIY

SEQ ID NO: 157747 - protein, 10 aa, Homo Sapiens
KLYEGVPLPF

SEQ ID NO: 157748 - protein, 10 aa, Homo Sapiens
KVADWTGATY

SEQ ID NO: 157749 - protein, 10 aa, Homo Sapiens
KVAEAAIQIF

SEQ ID NO: 157750 - protein, 10 aa, Homo Sapiens
KVFDGIPPPY

SEQ ID NO: 157751 - protein, 10 aa, Homo Sapiens
KVPQLEIVPN

SEQ ID NO: 157752 - protein, 10 aa, Homo Sapiens
LAAADISAYY

SEQ ID NO: 157753 - protein, 10 aa, Homo Sapiens
LAADFEIGHF

SEQ ID NO: 157754 - protein, 10 aa, Homo Sapiens
LPAAAAAGAA

SEQ ID NO: 157755 - protein, 10 aa, Homo Sapiens
LTAAAYRVTL

SEQ ID NO: 157756 - protein, 10 aa, Homo Sapiens
MAYGASFLSF

SEQ ID NO: 157757 - protein, 10 aa, Homo Sapiens
MIKEGDYNPL

SEQ ID NO: 157758 - protein, 10 aa, Homo Sapiens
MSYDRAITVF

SEQ ID NO: 157759 - protein, 10 aa, Homo Sapiens
NGFTGQPATY

SEQ ID NO: 157760 - protein, 10 aa, Homo Sapiens
QTPDFTPTKY

SEQ ID NO: 157761 - protein, 10 aa, Homo Sapiens
RALPFVPMSY

SEQ ID NO: 157762 - protein, 10 aa, Homo Sapiens
RAVDFFGAFY

SEQ ID NO: 157763 - protein, 10 aa, Homo Sapiens
RAWYGLGQTY

SEQ ID NO: 157764 - protein, 10 aa, Homo Sapiens
RIPEFNMAAF

SEQ ID NO: 157765 - protein, 10 aa, Homo Sapiens
RSKNPSKESF

SEQ ID NO: 157766 - protein, 10 aa, Homo Sapiens
RTVDWALAEY

SEQ ID NO: 157767 - protein, 10 aa, Homo Sapiens
RVFDHKQGTY

SEQ ID NO: 157768 - protein, 10 aa, Homo Sapiens
RVKGPGISKF

SEQ ID NO: 157769 - protein, 10 aa, Homo Sapiens
SACRTSGQTF

SEQ ID NO: 157770 - protein, 10 aa, Homo Sapiens
SAYSGHYIAH

SEQ ID NO: 157771 - protein, 10 aa, Homo Sapiens
SGFDGTVQVY

SEQ ID NO: 157772 - protein, 10 aa, Homo Sapiens
TAAETHYTYF

SEQ ID NO: 157773 - protein, 10 aa, Homo Sapiens
TAKRPSDIKF

SEQ ID NO: 157774 - protein, 10 aa, Homo Sapiens
TVKDVNQQEF

SEQ ID NO: 157775 - protein, 10 aa, Homo Sapiens
VAAPPPKNSF

SEQ ID NO: 157776 - protein, 10 aa, Homo Sapiens
VAASAYKALF

SEQ ID NO: 157777 - protein, 10 aa, Homo Sapiens
VAFCPDDTHF

SEQ ID NO: 157778 - protein, 10 aa, Homo Sapiens
VAFHPDGKSY

SEQ ID NO: 157779 - protein, 10 aa, Homo Sapiens
VAFTPDGNHF

SEQ ID NO: 157780 - protein, 10 aa, Homo Sapiens
VAMGKALLEF

SEQ ID NO: 157781 - protein, 10 aa, Homo Sapiens
VAMNPTNTVF

SEQ ID NO: 157782 - protein, 10 aa, Homo Sapiens
VAPVGSGSAL

SEQ ID NO: 157783 - protein, 10 aa, Homo Sapiens
VAYGATRYNY

SEQ ID NO: 157784 - protein, 10 aa, Homo Sapiens
VAYGVRESVF

SEQ ID NO: 157785 - protein, 10 aa, Homo Sapiens
VLPHQPLATY

SEQ ID NO: 157786 - protein, 10 aa, Homo Sapiens
VSKNPSKPHF

SEQ ID NO: 157787 - protein, 10 aa, Homo Sapiens
VSWTGKPVSY

SEQ ID NO: 157788 - protein, 10 aa, Homo Sapiens
VVPPFLQPEV

SEQ ID NO: 157789 - protein, 10 aa, Homo Sapiens
YAAPHPLQSY

SEQ ID NO: 157790 - protein, 10 aa, Homo Sapiens
YAFPKAVSVF

SEQ ID NO: 157791 - protein, 10 aa, Homo Sapiens
YAFPKSITVF

SEQ ID NO: 157792 - protein, 10 aa, Homo Sapiens
YANDFASEYY

SEQ ID NO: 157793 - protein, 10 aa, Homo Sapiens
YAVDRAITHL

SEQ ID NO: 157794 - protein, 10 aa, Homo Sapiens
YINPAKLTPY

SEQ ID NO: 157795 - protein, 10 aa, Homo Sapiens
YIPEHSPEYY

SEQ ID NO: 157796 - protein, 10 aa, Homo Sapiens
YLAPFSLSNY

SEQ ID NO: 157797 - protein, 10 aa, Homo Sapiens
YLPDFRFTPF

SEQ ID NO: 157798 - protein, 10 aa, Homo Sapiens
YLPQHTIETY

SEQ ID NO: 157799 - protein, 10 aa, Homo Sapiens
YMIDPSGVSY

SEQ ID NO: 157800 - protein, 10 aa, Homo Sapiens
YVFDGKPPQL

SEQ ID NO: 157801 - protein, 10 aa, Homo Sapiens
YVIEPHSMEF

SEQ ID NO: 157802 - protein, 10 aa, Homo Sapiens
YVIPHPVHAF

SEQ ID NO: 157803 - protein, 11 aa, Homo Sapiens
AAAQAASQHVF

SEQ ID NO: 157804 - protein, 11 aa, Homo Sapiens
AAFESDKSSYF

SEQ ID NO: 157805 - protein, 11 aa, Homo Sapiens
AAFGSEKPQSM

SEQ ID NO: 157806 - protein, 11 aa, Homo Sapiens
AAINPELLQLL

SEQ ID NO: 157807 - protein, 11 aa, Homo Sapiens
AAKDPANGRQF

SEQ ID NO: 157808 - protein, 11 aa, Homo Sapiens
AAKLPGEGAAL

SEQ ID NO: 157809 - protein, 11 aa, Homo Sapiens
AAQDPEDLCTF

SEQ ID NO: 157810 - protein, 11 aa, Homo Sapiens
AARPGFQQTSH

SEQ ID NO: 157811 - protein, 11 aa, Homo Sapiens
AAVDPDVLLSY

SEQ ID NO: 157812 - protein, 11 aa, Homo Sapiens
AAYYPSDVSSL

SEQ ID NO: 157813 - protein, 11 aa, Homo Sapiens
ASKDPTVSQTF

SEQ ID NO: 157814 - protein, 11 aa, Homo Sapiens
ATIDPDTISAL

SEQ ID NO: 157815 - protein, 11 aa, Homo Sapiens
AVRDISEASVF

SEQ ID NO: 157816 - protein, 11 aa, Homo Sapiens
EGCSSPIVVKF

SEQ ID NO: 157817 - protein, 11 aa, Homo Sapiens
FAKPVYPGQTL

SEQ ID NO: 157818 - protein, 11 aa, Homo Sapiens
FAKSVSFSDVF

SEQ ID NO: 157819 - protein, 11 aa, Homo Sapiens
FAVDPEKIQLY

SEQ ID NO: 157820 - protein, 11 aa, Homo Sapiens
FAYDGKDYLTL

SEQ ID NO: 157821 - protein, 11 aa, Homo Sapiens
FSKAPGSAGHY

SEQ ID NO: 157822 - protein, 11 aa, Homo Sapiens
FSKYPASSSVF

SEQ ID NO: 157823 - protein, 11 aa, Homo Sapiens
GVVDPRAISVL

SEQ ID NO: 157824 - protein, 11 aa, Homo Sapiens
HALDLGAMTPF

SEQ ID NO: 157825 - protein, 11 aa, Homo Sapiens
HAYDGKDYISL

SEQ ID NO: 157826 - protein, 11 aa, Homo Sapiens
IAMENIHSEMY

SEQ ID NO: 157827 - protein, 11 aa, Homo Sapiens
IIHDPGRGAPL

SEQ ID NO: 157828 - protein, 11 aa, Homo Sapiens
IIMEPTECSEL

SEQ ID NO: 157829 - protein, 11 aa, Homo Sapiens
ILQDPRLITPL

SEQ ID NO: 157830 - protein, 11 aa, Homo Sapiens
KAAEAAASAYY

SEQ ID NO: 157831 - protein, 11 aa, Homo Sapiens
KDAGLGQLATM

SEQ ID NO: 157832 - protein, 11 aa, Homo Sapiens
KLIEPGFLTAF

SEQ ID NO: 157833 - protein, 11 aa, Homo Sapiens
KQAEFFEPWVY

SEQ ID NO: 157834 - protein, 11 aa, Homo Sapiens
KQIDPEMLNSF

SEQ ID NO: 157835 - protein, 11 aa, Homo Sapiens
KVFDPSCGLPY

SEQ ID NO: 157836 - protein, 11 aa, Homo Sapiens
LAAAAAASYQV

SEQ ID NO: 157837 - protein, 11 aa, Homo Sapiens
LAVDGGKLTVF

SEQ ID NO: 157838 - protein, 11 aa, Homo Sapiens
LSRDPETLVGY

SEQ ID NO: 157839 - protein, 11 aa, Homo Sapiens
LVAQIAAGMEY

SEQ ID NO: 157840 - protein, 11 aa, Homo Sapiens
MIISPERLDPF

SEQ ID NO: 157841 - protein, 11 aa, Homo Sapiens
NAFDQYRDLYF

SEQ ID NO: 157842 - protein, 11 aa, Homo Sapiens
NSYWVGEDSTY

SEQ ID NO: 157843 - protein, 11 aa, Homo Sapiens
QAFWGTGKGYF

SEQ ID NO: 157844 - protein, 11 aa, Homo Sapiens
RAFDQGADAIY

SEQ ID NO: 157845 - protein, 11 aa, Homo Sapiens
RAFDSQNNTVY

SEQ ID NO: 157846 - protein, 11 aa, Homo Sapiens
RAFGGKDIKVY

SEQ ID NO: 157847 - protein, 11 aa, Homo Sapiens
RAFGNLGNTHY

SEQ ID NO: 157848 - protein, 11 aa, Homo Sapiens
RAVEPALLQRY

SEQ ID NO: 157849 - protein, 11 aa, Homo Sapiens
RIIDPEDLKAL

SEQ ID NO: 157850 - protein, 11 aa, Homo Sapiens
RIMDPDVITGY

SEQ ID NO: 157851 - protein, 11 aa, Homo Sapiens
SAKDARGMTPF

SEQ ID NO: 157852 - protein, 11 aa, Homo Sapiens
SAVNPEHLSYF

SEQ ID NO: 157853 - protein, 11 aa, Homo Sapiens
SAYDGKDYIAL

SEQ ID NO: 157854 - protein, 11 aa, Homo Sapiens
SIKDVLDSEGY

SEQ ID NO: 157855 - protein, 11 aa, Homo Sapiens
SINPLGGFVHY

SEQ ID NO: 157856 - protein, 11 aa, Homo Sapiens
SSINPDHLSYF

SEQ ID NO: 157857 - protein, 11 aa, Homo Sapiens
SSINPDHLTYF

SEQ ID NO: 157858 - protein, 11 aa, Homo Sapiens
STIDASNISCF

SEQ ID NO: 157859 - protein, 11 aa, Homo Sapiens
STINPDHLSYF

SEQ ID NO: 157860 - protein, 11 aa, Homo Sapiens
SVIDSAELQAY

SEQ ID NO: 157861 - protein, 11 aa, Homo Sapiens
SVTDPEKLNNY

SEQ ID NO: 157862 - protein, 11 aa, Homo Sapiens
SVTQAECSGVI

SEQ ID NO: 157863 - protein, 11 aa, Homo Sapiens
TAIPSELFSSF

SEQ ID NO: 157864 - protein, 11 aa, Homo Sapiens
TAQDPKLLVHL

SEQ ID NO: 157865 - protein, 11 aa, Homo Sapiens
TAVDPTLLKTF

SEQ ID NO: 157866 - protein, 11 aa, Homo Sapiens
TIFEGGKATCF

SEQ ID NO: 157867 - protein, 11 aa, Homo Sapiens
TIIDSDKIMVL

SEQ ID NO: 157868 - protein, 11 aa, Homo Sapiens
TTIDPRWLVEF

SEQ ID NO: 157869 - protein, 11 aa, Homo Sapiens
VAFEVYDDFLH

SEQ ID NO: 157870 - protein, 11 aa, Homo Sapiens
VAIQPDVFSHY

SEQ ID NO: 157871 - protein, 11 aa, Homo Sapiens
VAMSPELIQQF

SEQ ID NO: 157872 - protein, 11 aa, Homo Sapiens
VAQGVRVGGVF

SEQ ID NO: 157873 - protein, 11 aa, Homo Sapiens
VAQNPANMSKY

SEQ ID NO: 157874 - protein, 11 aa, Homo Sapiens
VAVDPSILARL

SEQ ID NO: 157875 - protein, 11 aa, Homo Sapiens
VAYPHDGKIFF

SEQ ID NO: 157876 - protein, 11 aa, Homo Sapiens
VIRDAVTYTEH

SEQ ID NO: 157877 - protein, 11 aa, Homo Sapiens
VLRPPGGGSNF

SEQ ID NO: 157878 - protein, 11 aa, Homo Sapiens
VMMDPNSTQRY

SEQ ID NO: 157879 - protein, 11 aa, Homo Sapiens
VSIEPNFHSLY

SEQ ID NO: 157880 - protein, 11 aa, Homo Sapiens
YAKDTRYSSSF

SEQ ID NO: 157881 - protein, 11 aa, Homo Sapiens
YAKPLAALVTY

SEQ ID NO: 157882 - protein, 11 aa, Homo Sapiens
YAVDPAQLQAL

SEQ ID NO: 157883 - protein, 11 aa, Homo Sapiens
YAWESSAGGSF

SEQ ID NO: 157884 - protein, 11 aa, Homo Sapiens
YAYDGKDYIAL

SEQ ID NO: 157885 - protein, 11 aa, Homo Sapiens
YAYDIEDGKFY

SEQ ID NO: 157886 - protein, 11 aa, Homo Sapiens
YIAGHPAFVNY

SEQ ID NO: 157887 - protein, 11 aa, Homo Sapiens
YLFEPHSGEEY

SEQ ID NO: 157888 - protein, 11 aa, Homo Sapiens
YSLDGRLLSTY

SEQ ID NO: 157889 - protein, 11 aa, Homo Sapiens
YVIDQGETDVY

SEQ ID NO: 157890 - protein, 8 aa, Homo Sapiens
AAFPIAVV

SEQ ID NO: 157891 - protein, 8 aa, Homo Sapiens
AAFRIVVM

SEQ ID NO: 157892 - protein, 8 aa, Homo Sapiens
AAGPPLVA

SEQ ID NO: 157893 - protein, 8 aa, Homo Sapiens
AFAEALLL

SEQ ID NO: 157894 - protein, 8 aa, Homo Sapiens
ASFNRMVM

SEQ ID NO: 157895 - protein, 8 aa, Homo Sapiens
ASGLIHRV

SEQ ID NO: 157896 - protein, 8 aa, Homo Sapiens
ASNYHLEV

SEQ ID NO: 157897 - protein, 8 aa, Homo Sapiens
AVGPASIL

SEQ ID NO: 157898 - protein, 8 aa, Homo Sapiens
CAFRVIQV

SEQ ID NO: 157899 - protein, 8 aa, Homo Sapiens
CSFRVLVV

SEQ ID NO: 157900 - protein, 8 aa, Homo Sapiens
ESLIACKA

SEQ ID NO: 157901 - protein, 8 aa, Homo Sapiens
FAAEAIAM

SEQ ID NO: 157902 - protein, 8 aa, Homo Sapiens
FAFVEFEL

SEQ ID NO: 157903 - protein, 8 aa, Homo Sapiens
FAFVEGTL

SEQ ID NO: 157904 - protein, 8 aa, Homo Sapiens
FAFVEYEV

SEQ ID NO: 157905 - protein, 8 aa, Homo Sapiens
FAFVHISF

SEQ ID NO: 157906 - protein, 8 aa, Homo Sapiens
FAGGMLRV

SEQ ID NO: 157907 - protein, 8 aa, Homo Sapiens
FAGLVQEI

SEQ ID NO: 157908 - protein, 8 aa, Homo Sapiens
FAGPCKVI

SEQ ID NO: 157909 - protein, 8 aa, Homo Sapiens
FAGPHSTL

SEQ ID NO: 157910 - protein, 8 aa, Homo Sapiens
FAHGFHEL

SEQ ID NO: 157911 - protein, 8 aa, Homo Sapiens
FAHIQAVF

SEQ ID NO: 157912 - protein, 8 aa, Homo Sapiens
FAHSFIEL

SEQ ID NO: 157913 - protein, 8 aa, Homo Sapiens
FAKCIEVM

SEQ ID NO: 157914 - protein, 8 aa, Homo Sapiens
FAKLVREV

SEQ ID NO: 157915 - protein, 8 aa, Homo Sapiens
FAMPHSIM

SEQ ID NO: 157916 - protein, 8 aa, Homo Sapiens
FANYIDKV

SEQ ID NO: 157917 - protein, 8 aa, Homo Sapiens
FFKMREMF

SEQ ID NO: 157918 - protein, 8 aa, Homo Sapiens
FGFHKPKM

SEQ ID NO: 157919 - protein, 8 aa, Homo Sapiens
FGNVHAYL

SEQ ID NO: 157920 - protein, 8 aa, Homo Sapiens
FNHINVEL

SEQ ID NO: 157921 - protein, 8 aa, Homo Sapiens
FQQPVMAL

SEQ ID NO: 157922 - protein, 8 aa, Homo Sapiens
FSFCREEM

SEQ ID NO: 157923 - protein, 8 aa, Homo Sapiens
FSFQEPIM

SEQ ID NO: 157924 - protein, 8 aa, Homo Sapiens
FSGPAITL

SEQ ID NO: 157925 - protein, 8 aa, Homo Sapiens
FSHLQPTL

SEQ ID NO: 157926 - protein, 8 aa, Homo Sapiens
FSKTWIEV

SEQ ID NO: 157927 - protein, 8 aa, Homo Sapiens
FSKVTKIL

SEQ ID NO: 157928 - protein, 8 aa, Homo Sapiens
FVNVQKEL

SEQ ID NO: 157929 - protein, 8 aa, Homo Sapiens
FWFFREAF

SEQ ID NO: 157930 - protein, 8 aa, Homo Sapiens
FWMTRQEY

SEQ ID NO: 157931 - protein, 8 aa, Homo Sapiens
HAGVISVL

SEQ ID NO: 157932 - protein, 8 aa, Homo Sapiens
HFNTRLSF

SEQ ID NO: 157933 - protein, 8 aa, Homo Sapiens
HSGPIHVL

SEQ ID NO: 157934 - protein, 8 aa, Homo Sapiens
IAGPVVEI

SEQ ID NO: 157935 - protein, 8 aa, Homo Sapiens
IANAISVV

SEQ ID NO: 157936 - protein, 8 aa, Homo Sapiens
IANINNCL

SEQ ID NO: 157937 - protein, 8 aa, Homo Sapiens
IEFIRSEY

SEQ ID NO: 157938 - protein, 8 aa, Homo Sapiens
IFKERESF

SEQ ID NO: 157939 - protein, 8 aa, Homo Sapiens
IIHEIAVL

SEQ ID NO: 157940 - protein, 8 aa, Homo Sapiens
ITGPLIRI

SEQ ID NO: 157941 - protein, 8 aa, Homo Sapiens
ITNIRPSF

SEQ ID NO: 157942 - protein, 8 aa, Homo Sapiens
IVGPQLTV

SEQ ID NO: 157943 - protein, 8 aa, Homo Sapiens
KAFFIESV

SEQ ID NO: 157944 - protein, 8 aa, Homo Sapiens
KAFLNAIM

SEQ ID NO: 157945 - protein, 8 aa, Homo Sapiens
KAFLNAVM

SEQ ID NO: 157946 - protein, 8 aa, Homo Sapiens
KAKFISSV

SEQ ID NO: 157947 - protein, 8 aa, Homo Sapiens
LAFLTCLL

SEQ ID NO: 157948 - protein, 8 aa, Homo Sapiens
LAGPALEL

SEQ ID NO: 157949 - protein, 8 aa, Homo Sapiens
LAGPVQEV

SEQ ID NO: 157950 - protein, 8 aa, Homo Sapiens
LANFCRIL

SEQ ID NO: 157951 - protein, 8 aa, Homo Sapiens
LAWINESL

SEQ ID NO: 157952 - protein, 8 aa, Homo Sapiens
LFFERSVY

SEQ ID NO: 157953 - protein, 8 aa, Homo Sapiens
LFYFRVPF

SEQ ID NO: 157954 - protein, 8 aa, Homo Sapiens
LQAFVPLR

SEQ ID NO: 157955 - protein, 8 aa, Homo Sapiens
LSKIIAVL

SEQ ID NO: 157956 - protein, 8 aa, Homo Sapiens
LTGPIQVI

SEQ ID NO: 157957 - protein, 8 aa, Homo Sapiens
LTGPVNVL

SEQ ID NO: 157958 - protein, 8 aa, Homo Sapiens
MFHIRAVI

SEQ ID NO: 157959 - protein, 8 aa, Homo Sapiens
MFHNRHLF

SEQ ID NO: 157960 - protein, 8 aa, Homo Sapiens
MSGKVKVW

SEQ ID NO: 157961 - protein, 8 aa, Homo Sapiens
MSGLLKVW

SEQ ID NO: 157962 - protein, 8 aa, Homo Sapiens
MSKLISEM

SEQ ID NO: 157963 - protein, 8 aa, Homo Sapiens
MSYVHTTV

SEQ ID NO: 157964 - protein, 8 aa, Homo Sapiens
NAASPLIV

SEQ ID NO: 157965 - protein, 8 aa, Homo Sapiens
NAFFNNTI

SEQ ID NO: 157966 - protein, 8 aa, Homo Sapiens
NAGPAIVI

SEQ ID NO: 157967 - protein, 8 aa, Homo Sapiens
NIFRNVEV

SEQ ID NO: 157968 - protein, 8 aa, Homo Sapiens
NSFVSLSV

SEQ ID NO: 157969 - protein, 8 aa, Homo Sapiens
NSMLVSIV

SEQ ID NO: 157970 - protein, 8 aa, Homo Sapiens
QAFIHNSL

SEQ ID NO: 157971 - protein, 8 aa, Homo Sapiens
RAFLQAIL

SEQ ID NO: 157972 - protein, 8 aa, Homo Sapiens
RAFREIQL

SEQ ID NO: 157973 - protein, 8 aa, Homo Sapiens
RTFSWASV

SEQ ID NO: 157974 - protein, 8 aa, Homo Sapiens
SAFAGWEV

SEQ ID NO: 157975 - protein, 8 aa, Homo Sapiens
SAGPMRLY

SEQ ID NO: 157976 - protein, 8 aa, Homo Sapiens
SAYEVIKL

SEQ ID NO: 157977 - protein, 8 aa, Homo Sapiens
SGFRNIAV

SEQ ID NO: 157978 - protein, 8 aa, Homo Sapiens
TFPHPVYY

SEQ ID NO: 157979 - protein, 8 aa, Homo Sapiens
TIFRTISV

SEQ ID NO: 157980 - protein, 8 aa, Homo Sapiens
TQMVRMIL

SEQ ID NO: 157981 - protein, 8 aa, Homo Sapiens
VAFFNNFL

SEQ ID NO: 157982 - protein, 8 aa, Homo Sapiens
VAFRICAV

SEQ ID NO: 157983 - protein, 8 aa, Homo Sapiens
VAGFNPAL

SEQ ID NO: 157984 - protein, 8 aa, Homo Sapiens
VAGPVGLL

SEQ ID NO: 157985 - protein, 8 aa, Homo Sapiens
VAKVEPAV

SEQ ID NO: 157986 - protein, 8 aa, Homo Sapiens
VAMQVPVV

SEQ ID NO: 157987 - protein, 8 aa, Homo Sapiens
VAMVHPLL

SEQ ID NO: 157988 - protein, 8 aa, Homo Sapiens
VANVEHIL

SEQ ID NO: 157989 - protein, 8 aa, Homo Sapiens
VINYAMFL

SEQ ID NO: 157990 - protein, 8 aa, Homo Sapiens
VPCILVGP

SEQ ID NO: 157991 - protein, 8 aa, Homo Sapiens
VTHLHRVV

SEQ ID NO: 157992 - protein, 8 aa, Homo Sapiens
VTHVIPVA

SEQ ID NO: 157993 - protein, 8 aa, Homo Sapiens
VTKLRMEL

SEQ ID NO: 157994 - protein, 8 aa, Homo Sapiens
VVGPSSVL

SEQ ID NO: 157995 - protein, 8 aa, Homo Sapiens
YAFLHRTL

SEQ ID NO: 157996 - protein, 8 aa, Homo Sapiens
YAFLREAL

SEQ ID NO: 157997 - protein, 8 aa, Homo Sapiens
YAFNRDII

SEQ ID NO: 157998 - protein, 8 aa, Homo Sapiens
YAGAILEV

SEQ ID NO: 157999 - protein, 8 aa, Homo Sapiens
YAKLHPEM

SEQ ID NO: 158000 - protein, 8 aa, Homo Sapiens
YAKLIAEL

SEQ ID NO: 158001 - protein, 8 aa, Homo Sapiens
YGMPRQIL

SEQ ID NO: 158002 - protein, 8 aa, Homo Sapiens
YIQVEPVL

SEQ ID NO: 158003 - protein, 8 aa, Homo Sapiens
YQFFREAL

SEQ ID NO: 158004 - protein, 8 aa, Homo Sapiens
YVFIWRTV

SEQ ID NO: 158005 - protein, 9 aa, Homo Sapiens
AAAALHPAL

SEQ ID NO: 158006 - protein, 9 aa, Homo Sapiens
AAAALVLKA

SEQ ID NO: 158007 - protein, 9 aa, Homo Sapiens
AAAAVIPTV

SEQ ID NO: 158008 - protein, 9 aa, Homo Sapiens
AAADIFKHY

SEQ ID NO: 158009 - protein, 9 aa, Homo Sapiens
AAADIVNFL

SEQ ID NO: 158010 - protein, 9 aa, Homo Sapiens
AAADSIKIW

SEQ ID NO: 158011 - protein, 9 aa, Homo Sapiens
AAAFQPLII

SEQ ID NO: 158012 - protein, 9 aa, Homo Sapiens
AAAGLHRYL

SEQ ID NO: 158013 - protein, 9 aa, Homo Sapiens
AAAGWLLRL

SEQ ID NO: 158014 - protein, 9 aa, Homo Sapiens
AAAHFYFEL

SEQ ID NO: 158015 - protein, 9 aa, Homo Sapiens
AAAIGLVIY

SEQ ID NO: 158016 - protein, 9 aa, Homo Sapiens
AAAKALRIL

SEQ ID NO: 158017 - protein, 9 aa, Homo Sapiens
AAAKNIRVW

SEQ ID NO: 158018 - protein, 9 aa, Homo Sapiens
AAANAIRVY

SEQ ID NO: 158019 - protein, 9 aa, Homo Sapiens
AAANLTKIV

SEQ ID NO: 158020 - protein, 9 aa, Homo Sapiens
AAAPHLLLL

SEQ ID NO: 158021 - protein, 9 aa, Homo Sapiens
AAAPIISSV

SEQ ID NO: 158022 - protein, 9 aa, Homo Sapiens
AAAPLRLIA

SEQ ID NO: 158023 - protein, 9 aa, Homo Sapiens
AAAPQLLIV

SEQ ID NO: 158024 - protein, 9 aa, Homo Sapiens
AAAPSLLIL

SEQ ID NO: 158025 - protein, 9 aa, Homo Sapiens
AAAPVIKAY

SEQ ID NO: 158026 - protein, 9 aa, Homo Sapiens
AAASFPWSA

SEQ ID NO: 158027 - protein, 9 aa, Homo Sapiens
AAASIANIV

SEQ ID NO: 158028 - protein, 9 aa, Homo Sapiens
AAASLIRLV

SEQ ID NO: 158029 - protein, 9 aa, Homo Sapiens
AAASLVPVV

SEQ ID NO: 158030 - protein, 9 aa, Homo Sapiens
AAATSVHVV

SEQ ID NO: 158031 - protein, 9 aa, Homo Sapiens
AAFADALEF

SEQ ID NO: 158032 - protein, 9 aa, Homo Sapiens
AAFAYTVKY

SEQ ID NO: 158033 - protein, 9 aa, Homo Sapiens
AAFCKLIVY

SEQ ID NO: 158034 - protein, 9 aa, Homo Sapiens
AAFDAAWMV

SEQ ID NO: 158035 - protein, 9 aa, Homo Sapiens
AAFDGGFTV

SEQ ID NO: 158036 - protein, 9 aa, Homo Sapiens
AAFDHICTF

SEQ ID NO: 158037 - protein, 9 aa, Homo Sapiens
AAFDKIQQL

SEQ ID NO: 158038 - protein, 9 aa, Homo Sapiens
AAFDQWREW

SEQ ID NO: 158039 - protein, 9 aa, Homo Sapiens
AAFEGTVFF

SEQ ID NO: 158040 - protein, 9 aa, Homo Sapiens
AAFEKALEV

SEQ ID NO: 158041 - protein, 9 aa, Homo Sapiens
AAFGAPGII

SEQ ID NO: 158042 - protein, 9 aa, Homo Sapiens
AAFGDKIFY

SEQ ID NO: 158043 - protein, 9 aa, Homo Sapiens
AAFGGFLYF

SEQ ID NO: 158044 - protein, 9 aa, Homo Sapiens
AAFGRDLFL

SEQ ID NO: 158045 - protein, 9 aa, Homo Sapiens
AAFHEEFVV

SEQ ID NO: 158046 - protein, 9 aa, Homo Sapiens
AAFHLALYT

SEQ ID NO: 158047 - protein, 9 aa, Homo Sapiens
AAFHNFIKV

SEQ ID NO: 158048 - protein, 9 aa, Homo Sapiens
AAFIWPMLI

SEQ ID NO: 158049 - protein, 9 aa, Homo Sapiens
AAFLGERVF

SEQ ID NO: 158050 - protein, 9 aa, Homo Sapiens
AAFLKAIGY

SEQ ID NO: 158051 - protein, 9 aa, Homo Sapiens
AAFLLPVIM

SEQ ID NO: 158052 - protein, 9 aa, Homo Sapiens
AAFNALVTF

SEQ ID NO: 158053 - protein, 9 aa, Homo Sapiens
AAFPGASLY

SEQ ID NO: 158054 - protein, 9 aa, Homo Sapiens
AAFPGENAL

SEQ ID NO: 158055 - protein, 9 aa, Homo Sapiens
AAFPIAVVA

SEQ ID NO: 158056 - protein, 9 aa, Homo Sapiens
AAFPLAPLL

SEQ ID NO: 158057 - protein, 9 aa, Homo Sapiens
AAFPLPVVV

SEQ ID NO: 158058 - protein, 9 aa, Homo Sapiens
AAFPYGGVL

SEQ ID NO: 158059 - protein, 9 aa, Homo Sapiens
AAFPYPMMH

SEQ ID NO: 158060 - protein, 9 aa, Homo Sapiens
AAFQEAFYV

SEQ ID NO: 158061 - protein, 9 aa, Homo Sapiens
AAFQHLLLL

SEQ ID NO: 158062 - protein, 9 aa, Homo Sapiens
AAFQYGIKM

SEQ ID NO: 158063 - protein, 9 aa, Homo Sapiens
AAFSKLIIY

SEQ ID NO: 158064 - protein, 9 aa, Homo Sapiens
AAFSKYLTA

SEQ ID NO: 158065 - protein, 9 aa, Homo Sapiens
AAFTLRTQY

SEQ ID NO: 158066 - protein, 9 aa, Homo Sapiens
AAFTRALEY

SEQ ID NO: 158067 - protein, 9 aa, Homo Sapiens
AAFVKAVGF

SEQ ID NO: 158068 - protein, 9 aa, Homo Sapiens
AAFVKKLVY

SEQ ID NO: 158069 - protein, 9 aa, Homo Sapiens
AAFWGQMQM

SEQ ID NO: 158070 - protein, 9 aa, Homo Sapiens
AAFYGCLYA

SEQ ID NO: 158071 - protein, 9 aa, Homo Sapiens
AAFYHPVRY

SEQ ID NO: 158072 - protein, 9 aa, Homo Sapiens
AAGTTVKVW

SEQ ID NO: 158073 - protein, 9 aa, Homo Sapiens
AAIASLLYL

SEQ ID NO: 158074 - protein, 9 aa, Homo Sapiens
AAIDHQIEV

SEQ ID NO: 158075 - protein, 9 aa, Homo Sapiens
AAIEFISKM

SEQ ID NO: 158076 - protein, 9 aa, Homo Sapiens
AAIEHTIQW

SEQ ID NO: 158077 - protein, 9 aa, Homo Sapiens
AAIEWIIEH

SEQ ID NO: 158078 - protein, 9 aa, Homo Sapiens
AAIGLVIYY

SEQ ID NO: 158079 - protein, 9 aa, Homo Sapiens
AAIKAIKFY

SEQ ID NO: 158080 - protein, 9 aa, Homo Sapiens
AAIKIIRQL

SEQ ID NO: 158081 - protein, 9 aa, Homo Sapiens
AAILEHSLF

SEQ ID NO: 158082 - protein, 9 aa, Homo Sapiens
AAINFQPKM

SEQ ID NO: 158083 - protein, 9 aa, Homo Sapiens
AAISEVLYV

SEQ ID NO: 158084 - protein, 9 aa, Homo Sapiens
AAIYHVLHF

SEQ ID NO: 158085 - protein, 9 aa, Homo Sapiens
AAKDLISKL

SEQ ID NO: 158086 - protein, 9 aa, Homo Sapiens
AAKEQWKEL

SEQ ID NO: 158087 - protein, 9 aa, Homo Sapiens
AAKEYPFIL

SEQ ID NO: 158088 - protein, 9 aa, Homo Sapiens
AAKNFITKM

SEQ ID NO: 158089 - protein, 9 aa, Homo Sapiens
AAKPFFCEL

SEQ ID NO: 158090 - protein, 9 aa, Homo Sapiens
AALMRPLVV

SEQ ID NO: 158091 - protein, 9 aa, Homo Sapiens
AALPKATIL

SEQ ID NO: 158092 - protein, 9 aa, Homo Sapiens
AALTFPVLF

SEQ ID NO: 158093 - protein, 9 aa, Homo Sapiens
AALTIIRYY

SEQ ID NO: 158094 - protein, 9 aa, Homo Sapiens
AAMDSAWMV

SEQ ID NO: 158095 - protein, 9 aa, Homo Sapiens
AAMELAQMV

SEQ ID NO: 158096 - protein, 9 aa, Homo Sapiens
AAMLDTVVF

SEQ ID NO: 158097 - protein, 9 aa, Homo Sapiens
AAMPRIYEL

SEQ ID NO: 158098 - protein, 9 aa, Homo Sapiens
AAMPRPVSY

SEQ ID NO: 158099 - protein, 9 aa, Homo Sapiens
AAMPVAQHL

SEQ ID NO: 158100 - protein, 9 aa, Homo Sapiens
AAMSHLLEM

SEQ ID NO: 158101 - protein, 9 aa, Homo Sapiens
AAMWALQTV

SEQ ID NO: 158102 - protein, 9 aa, Homo Sapiens
AANPHSFVF

SEQ ID NO: 158103 - protein, 9 aa, Homo Sapiens
AAPALPFYY

SEQ ID NO: 158104 - protein, 9 aa, Homo Sapiens
AAQAIFPSM

SEQ ID NO: 158105 - protein, 9 aa, Homo Sapiens
AAQEAVKLY

SEQ ID NO: 158106 - protein, 9 aa, Homo Sapiens
AAQETVRLL

SEQ ID NO: 158107 - protein, 9 aa, Homo Sapiens
AAQFIPKFF

SEQ ID NO: 158108 - protein, 9 aa, Homo Sapiens
AAQSLVQLL

SEQ ID NO: 158109 - protein, 9 aa, Homo Sapiens
AAQVRIKIL

SEQ ID NO: 158110 - protein, 9 aa, Homo Sapiens
AARFGISSV

SEQ ID NO: 158111 - protein, 9 aa, Homo Sapiens
AARLRAVDF

SEQ ID NO: 158112 - protein, 9 aa, Homo Sapiens
AARPVPWNA

SEQ ID NO: 158113 - protein, 9 aa, Homo Sapiens
AASDFIFLV

SEQ ID NO: 158114 - protein, 9 aa, Homo Sapiens
AASGHFICV

SEQ ID NO: 158115 - protein, 9 aa, Homo Sapiens
AASGLPLMV

SEQ ID NO: 158116 - protein, 9 aa, Homo Sapiens
AASMRALVL

SEQ ID NO: 158117 - protein, 9 aa, Homo Sapiens
AASPIITLV

SEQ ID NO: 158118 - protein, 9 aa, Homo Sapiens
AASSIQRVL

SEQ ID NO: 158119 - protein, 9 aa, Homo Sapiens
AATEIVERV

SEQ ID NO: 158120 - protein, 9 aa, Homo Sapiens
AATEVVNIL

SEQ ID NO: 158121 - protein, 9 aa, Homo Sapiens
AATPAVRTV

SEQ ID NO: 158122 - protein, 9 aa, Homo Sapiens
AATQLVNQL

SEQ ID NO: 158123 - protein, 9 aa, Homo Sapiens
AATTVLQEL

SEQ ID NO: 158124 - protein, 9 aa, Homo Sapiens
AAVAAVLYV

SEQ ID NO: 158125 - protein, 9 aa, Homo Sapiens
AAVAIACVV

SEQ ID NO: 158126 - protein, 9 aa, Homo Sapiens
AAVALLLQV

SEQ ID NO: 158127 - protein, 9 aa, Homo Sapiens
AAVDLIIKS

SEQ ID NO: 158128 - protein, 9 aa, Homo Sapiens
AAVDNPIFY

SEQ ID NO: 158129 - protein, 9 aa, Homo Sapiens
AAVGHVLVV

SEQ ID NO: 158130 - protein, 9 aa, Homo Sapiens
AAVHIILVI

SEQ ID NO: 158131 - protein, 9 aa, Homo Sapiens
AAVLRIPIL

SEQ ID NO: 158132 - protein, 9 aa, Homo Sapiens
AAVNVICEL

SEQ ID NO: 158133 - protein, 9 aa, Homo Sapiens
AAVPAVIQF

SEQ ID NO: 158134 - protein, 9 aa, Homo Sapiens
AAVPLVRLF

SEQ ID NO: 158135 - protein, 9 aa, Homo Sapiens
AAVPLYRLY

SEQ ID NO: 158136 - protein, 9 aa, Homo Sapiens
AAVQLIWVV

SEQ ID NO: 158137 - protein, 9 aa, Homo Sapiens
AAVSFISKF

SEQ ID NO: 158138 - protein, 9 aa, Homo Sapiens
AAVSFPYVI

SEQ ID NO: 158139 - protein, 9 aa, Homo Sapiens
AAVVFPMMV

SEQ ID NO: 158140 - protein, 9 aa, Homo Sapiens
AAYAGGLVL

SEQ ID NO: 158141 - protein, 9 aa, Homo Sapiens
AAYFYGPIF

SEQ ID NO: 158142 - protein, 9 aa, Homo Sapiens
AAYGLVVVT

SEQ ID NO: 158143 - protein, 9 aa, Homo Sapiens
AAYGWPLYI

SEQ ID NO: 158144 - protein, 9 aa, Homo Sapiens
AAYGYGIRY

SEQ ID NO: 158145 - protein, 9 aa, Homo Sapiens
AAYHLIIEL

SEQ ID NO: 158146 - protein, 9 aa, Homo Sapiens
AAYHVEVTF

SEQ ID NO: 158147 - protein, 9 aa, Homo Sapiens
AAYKEAFEI

SEQ ID NO: 158148 - protein, 9 aa, Homo Sapiens
AAYKWLVCY

SEQ ID NO: 158149 - protein, 9 aa, Homo Sapiens
AAYLRALSL

SEQ ID NO: 158150 - protein, 9 aa, Homo Sapiens
AAYPEIVAV

SEQ ID NO: 158151 - protein, 9 aa, Homo Sapiens
AAYPQVRCY

SEQ ID NO: 158152 - protein, 9 aa, Homo Sapiens
AAYQSVRIL

SEQ ID NO: 158153 - protein, 9 aa, Homo Sapiens
AAYYHPSYL

SEQ ID NO: 158154 - protein, 9 aa, Homo Sapiens
AAYYLPRHL

SEQ ID NO: 158155 - protein, 9 aa, Homo Sapiens
AAYYPPSQI

SEQ ID NO: 158156 - protein, 9 aa, Homo Sapiens
AGIAFAPVY

SEQ ID NO: 158157 - protein, 9 aa, Homo Sapiens
AGIDHLVSY

SEQ ID NO: 158158 - protein, 9 aa, Homo Sapiens
AGIGWLITF

SEQ ID NO: 158159 - protein, 9 aa, Homo Sapiens
AGVGWRVDY

SEQ ID NO: 158160 - protein, 9 aa, Homo Sapiens
AGYEAPVLF

SEQ ID NO: 158161 - protein, 9 aa, Homo Sapiens
AGYPNVNIH

SEQ ID NO: 158162 - protein, 9 aa, Homo Sapiens
AGYQHIRMY

SEQ ID NO: 158163 - protein, 9 aa, Homo Sapiens
AGYSDPILV

SEQ ID NO: 158164 - protein, 9 aa, Homo Sapiens
AGYYLVVYY

SEQ ID NO: 158165 - protein, 9 aa, Homo Sapiens
AIIDTVINY

SEQ ID NO: 158166 - protein, 9 aa, Homo Sapiens
AIYDVTVVY

SEQ ID NO: 158167 - protein, 9 aa, Homo Sapiens
ALFPSVRIL

SEQ ID NO: 158168 - protein, 9 aa, Homo Sapiens
ALLNFVVKY

SEQ ID NO: 158169 - protein, 9 aa, Homo Sapiens
ALYPNVVQV

SEQ ID NO: 158170 - protein, 9 aa, Homo Sapiens
AMASIINRL

SEQ ID NO: 158171 - protein, 9 aa, Homo Sapiens
AMMANRLSF

SEQ ID NO: 158172 - protein, 9 aa, Homo Sapiens
AMPYFIQVM

SEQ ID NO: 158173 - protein, 9 aa, Homo Sapiens
AMYGGLVLF

SEQ ID NO: 158174 - protein, 9 aa, Homo Sapiens
AMYPGTFYF

SEQ ID NO: 158175 - protein, 9 aa, Homo Sapiens
AMYPHIFYF

SEQ ID NO: 158176 - protein, 9 aa, Homo Sapiens
AMYPIRSAY

SEQ ID NO: 158177 - protein, 9 aa, Homo Sapiens
AQGPTPRYF

SEQ ID NO: 158178 - protein, 9 aa, Homo Sapiens
AQISWVTVF

SEQ ID NO: 158179 - protein, 9 aa, Homo Sapiens
AQKNHIPVF

SEQ ID NO: 158180 - protein, 9 aa, Homo Sapiens
AQVPFEQIL

SEQ ID NO: 158181 - protein, 9 aa, Homo Sapiens
ASAAVFSRL

SEQ ID NO: 158182 - protein, 9 aa, Homo Sapiens
ASFDGTIKV

SEQ ID NO: 158183 - protein, 9 aa, Homo Sapiens
ASFLGLPRV

SEQ ID NO: 158184 - protein, 9 aa, Homo Sapiens
ASFPGANII

SEQ ID NO: 158185 - protein, 9 aa, Homo Sapiens
ASFPHLRIL

SEQ ID NO: 158186 - protein, 9 aa, Homo Sapiens
ASIYFCIHF

SEQ ID NO: 158187 - protein, 9 aa, Homo Sapiens
ASSPLITVF

SEQ ID NO: 158188 - protein, 9 aa, Homo Sapiens
ASTALVWVV

SEQ ID NO: 158189 - protein, 9 aa, Homo Sapiens
ASVDKVLEL

SEQ ID NO: 158190 - protein, 9 aa, Homo Sapiens
ASYPHCLQF

SEQ ID NO: 158191 - protein, 9 aa, Homo Sapiens
ASYSGLMRI

SEQ ID NO: 158192 - protein, 9 aa, Homo Sapiens
ATADTVIIY

SEQ ID NO: 158193 - protein, 9 aa, Homo Sapiens
ATFAAVVLY

SEQ ID NO: 158194 - protein, 9 aa, Homo Sapiens
ATFPKEIQM

SEQ ID NO: 158195 - protein, 9 aa, Homo Sapiens
ATFPVAIVM

SEQ ID NO: 158196 - protein, 9 aa, Homo Sapiens
ATIEKIIRF

SEQ ID NO: 158197 - protein, 9 aa, Homo Sapiens
ATIPLLVFY

SEQ ID NO: 158198 - protein, 9 aa, Homo Sapiens
ATIQLIRIL

SEQ ID NO: 158199 - protein, 9 aa, Homo Sapiens
ATSPTVLYV

SEQ ID NO: 158200 - protein, 9 aa, Homo Sapiens
ATVNFITSY

SEQ ID NO: 158201 - protein, 9 aa, Homo Sapiens
ATVPFLLQL

SEQ ID NO: 158202 - protein, 9 aa, Homo Sapiens
ATYHRAIKV

SEQ ID NO: 158203 - protein, 9 aa, Homo Sapiens
ATYNEIVTF

SEQ ID NO: 158204 - protein, 9 aa, Homo Sapiens
ATYPYQVVR

SEQ ID NO: 158205 - protein, 9 aa, Homo Sapiens
CAIPQVMAI

SEQ ID NO: 158206 - protein, 9 aa, Homo Sapiens
CAYDRIVVA

SEQ ID NO: 158207 - protein, 9 aa, Homo Sapiens
CAYPRLEIY

SEQ ID NO: 158208 - protein, 9 aa, Homo Sapiens
CLADIFRIY

SEQ ID NO: 158209 - protein, 9 aa, Homo Sapiens
CLYPDGVFY

SEQ ID NO: 158210 - protein, 9 aa, Homo Sapiens
CMVEIVQKY

SEQ ID NO: 158211 - protein, 9 aa, Homo Sapiens
CQWDQPVRY

SEQ ID NO: 158212 - protein, 9 aa, Homo Sapiens
CSFSWTVTY

SEQ ID NO: 158213 - protein, 9 aa, Homo Sapiens
CSIGFAVRY

SEQ ID NO: 158214 - protein, 9 aa, Homo Sapiens
CSRAYFLVL

SEQ ID NO: 158215 - protein, 9 aa, Homo Sapiens
CSSDFIRIL

SEQ ID NO: 158216 - protein, 9 aa, Homo Sapiens
CSSGLVKLW

SEQ ID NO: 158217 - protein, 9 aa, Homo Sapiens
CSSPHALVL

SEQ ID NO: 158218 - protein, 9 aa, Homo Sapiens
CSSPIVVKF

SEQ ID NO: 158219 - protein, 9 aa, Homo Sapiens
CSSPMVVKF

SEQ ID NO: 158220 - protein, 9 aa, Homo Sapiens
CSVPFENKL

SEQ ID NO: 158221 - protein, 9 aa, Homo Sapiens
CSYPHIIRL

SEQ ID NO: 158222 - protein, 9 aa, Homo Sapiens
CTYGKPVTF

SEQ ID NO: 158223 - protein, 9 aa, Homo Sapiens
EAADIIQKL

SEQ ID NO: 158224 - protein, 9 aa, Homo Sapiens
EAAEVILRV

SEQ ID NO: 158225 - protein, 9 aa, Homo Sapiens
EAANFIMKV

SEQ ID NO: 158226 - protein, 9 aa, Homo Sapiens
EAFQGTKVF

SEQ ID NO: 158227 - protein, 9 aa, Homo Sapiens
EAFYNVITV

SEQ ID NO: 158228 - protein, 9 aa, Homo Sapiens
EAIGAVIHY

SEQ ID NO: 158229 - protein, 9 aa, Homo Sapiens
EAVDWLHEL

SEQ ID NO: 158230 - protein, 9 aa, Homo Sapiens
EAVKWMVVF

SEQ ID NO: 158231 - protein, 9 aa, Homo Sapiens
EAVPHVLQI

SEQ ID NO: 158232 - protein, 9 aa, Homo Sapiens
EAYNAVVRY

SEQ ID NO: 158233 - protein, 9 aa, Homo Sapiens
ESYGNPLRV

SEQ ID NO: 158234 - protein, 9 aa, Homo Sapiens
ETISLIIHY

SEQ ID NO: 158235 - protein, 9 aa, Homo Sapiens
ETLALLEVK

SEQ ID NO: 158236 - protein, 9 aa, Homo Sapiens
FAADIISVL

SEQ ID NO: 158237 - protein, 9 aa, Homo Sapiens
FAADLAEEL

SEQ ID NO: 158238 - protein, 9 aa, Homo Sapiens
FAAFLASRL

SEQ ID NO: 158239 - protein, 9 aa, Homo Sapiens
FAAGIIAHL

SEQ ID NO: 158240 - protein, 9 aa, Homo Sapiens
FAAHLRCTY

SEQ ID NO: 158241 - protein, 9 aa, Homo Sapiens
FAASFAHLL

SEQ ID NO: 158242 - protein, 9 aa, Homo Sapiens
FAATVITTI

SEQ ID NO: 158243 - protein, 9 aa, Homo Sapiens
FADSTVRVW

SEQ ID NO: 158244 - protein, 9 aa, Homo Sapiens
FAFCYPFSY

SEQ ID NO: 158245 - protein, 9 aa, Homo Sapiens
FAFDEIVAL

SEQ ID NO: 158246 - protein, 9 aa, Homo Sapiens
FAFDPSVNY

SEQ ID NO: 158247 - protein, 9 aa, Homo Sapiens
FAFEEAIGY

SEQ ID NO: 158248 - protein, 9 aa, Homo Sapiens
FAFEGILIK

SEQ ID NO: 158249 - protein, 9 aa, Homo Sapiens
FAFEHSEEY

SEQ ID NO: 158250 - protein, 9 aa, Homo Sapiens
FAFESVVAI

SEQ ID NO: 158251 - protein, 9 aa, Homo Sapiens
FAFFDPVMY

SEQ ID NO: 158252 - protein, 9 aa, Homo Sapiens
FAFGGLCER

SEQ ID NO: 158253 - protein, 9 aa, Homo Sapiens
FAFGSPIGM

SEQ ID NO: 158254 - protein, 9 aa, Homo Sapiens
FAFMVVNNL

SEQ ID NO: 158255 - protein, 9 aa, Homo Sapiens
FAFPGEILM

SEQ ID NO: 158256 - protein, 9 aa, Homo Sapiens
FAFPLHVDY

SEQ ID NO: 158257 - protein, 9 aa, Homo Sapiens
FAFRHVLKL

SEQ ID NO: 158258 - protein, 9 aa, Homo Sapiens
FAFRNFLYL

SEQ ID NO: 158259 - protein, 9 aa, Homo Sapiens
FAFRYVTTI

SEQ ID NO: 158260 - protein, 9 aa, Homo Sapiens
FAFSCLLTL

SEQ ID NO: 158261 - protein, 9 aa, Homo Sapiens
FAFSGVLRA

SEQ ID NO: 158262 - protein, 9 aa, Homo Sapiens
FAFTPSRIY

SEQ ID NO: 158263 - protein, 9 aa, Homo Sapiens
FAFVTDNTY

SEQ ID NO: 158264 - protein, 9 aa, Homo Sapiens
FAGASIKIA

SEQ ID NO: 158265 - protein, 9 aa, Homo Sapiens
FAGFLPRII

SEQ ID NO: 158266 - protein, 9 aa, Homo Sapiens
FAGWLCKTL

SEQ ID NO: 158267 - protein, 9 aa, Homo Sapiens
FAHDSTRVI

SEQ ID NO: 158268 - protein, 9 aa, Homo Sapiens
FAHHLPVWL

SEQ ID NO: 158269 - protein, 9 aa, Homo Sapiens
FAHLPKSTF

SEQ ID NO: 158270 - protein, 9 aa, Homo Sapiens
FAHPYQYEL

SEQ ID NO: 158271 - protein, 9 aa, Homo Sapiens
FAHVIFQNV

SEQ ID NO: 158272 - protein, 9 aa, Homo Sapiens
FAIEREFFF

SEQ ID NO: 158273 - protein, 9 aa, Homo Sapiens
FAIHKKIVL

SEQ ID NO: 158274 - protein, 9 aa, Homo Sapiens
FAIPLIEKL

SEQ ID NO: 158275 - protein, 9 aa, Homo Sapiens
FAIPMIHAV

SEQ ID NO: 158276 - protein, 9 aa, Homo Sapiens
FAISILQQI

SEQ ID NO: 158277 - protein, 9 aa, Homo Sapiens
FAIWHIIAF

SEQ ID NO: 158278 - protein, 9 aa, Homo Sapiens
FAKDFMTYL

SEQ ID NO: 158279 - protein, 9 aa, Homo Sapiens
FAKPFLASL

SEQ ID NO: 158280 - protein, 9 aa, Homo Sapiens
FAKVHILYV

SEQ ID NO: 158281 - protein, 9 aa, Homo Sapiens
FALPFGRTA

SEQ ID NO: 158282 - protein, 9 aa, Homo Sapiens
FALPYPRFR

SEQ ID NO: 158283 - protein, 9 aa, Homo Sapiens
FALPYVIVL

SEQ ID NO: 158284 - protein, 9 aa, Homo Sapiens
FALVFPLMY

SEQ ID NO: 158285 - protein, 9 aa, Homo Sapiens
FAMEFVKYY

SEQ ID NO: 158286 - protein, 9 aa, Homo Sapiens
FAMFSGTHV

SEQ ID NO: 158287 - protein, 9 aa, Homo Sapiens
FAMPYFIQV

SEQ ID NO: 158288 - protein, 9 aa, Homo Sapiens
FAMYPPSMI

SEQ ID NO: 158289 - protein, 9 aa, Homo Sapiens
FANERCLQL

SEQ ID NO: 158290 - protein, 9 aa, Homo Sapiens
FANLGRTTL

SEQ ID NO: 158291 - protein, 9 aa, Homo Sapiens
FAQAMMSVL

SEQ ID NO: 158292 - protein, 9 aa, Homo Sapiens
FAQEAISVL

SEQ ID NO: 158293 - protein, 9 aa, Homo Sapiens
FAQEALTVL

SEQ ID NO: 158294 - protein, 9 aa, Homo Sapiens
FAQHGGIYV

SEQ ID NO: 158295 - protein, 9 aa, Homo Sapiens
FAQQQPPVV

SEQ ID NO: 158296 - protein, 9 aa, Homo Sapiens
FAQYLISEL

SEQ ID NO: 158297 - protein, 9 aa, Homo Sapiens
FASEVSNVL

SEQ ID NO: 158298 - protein, 9 aa, Homo Sapiens
FASEYPLIL

SEQ ID NO: 158299 - protein, 9 aa, Homo Sapiens
FASFIVQYY

SEQ ID NO: 158300 - protein, 9 aa, Homo Sapiens
FASFPHMVL

SEQ ID NO: 158301 - protein, 9 aa, Homo Sapiens
FASGLIHRV

SEQ ID NO: 158302 - protein, 9 aa, Homo Sapiens
FASHVSPEV

SEQ ID NO: 158303 - protein, 9 aa, Homo Sapiens
FASKLVLKA

SEQ ID NO: 158304 - protein, 9 aa, Homo Sapiens
FASPKIDSV

SEQ ID NO: 158305 - protein, 9 aa, Homo Sapiens
FASPMKSVV

SEQ ID NO: 158306 - protein, 9 aa, Homo Sapiens
FASPTQVFF

SEQ ID NO: 158307 - protein, 9 aa, Homo Sapiens
FASQVEQLI

SEQ ID NO: 158308 - protein, 9 aa, Homo Sapiens
FASTILHLV

SEQ ID NO: 158309 - protein, 9 aa, Homo Sapiens
FASVFEKYF

SEQ ID NO: 158310 - protein, 9 aa, Homo Sapiens
FASVLIRRI

SEQ ID NO: 158311 - protein, 9 aa, Homo Sapiens
FASYATIIL

SEQ ID NO: 158312 - protein, 9 aa, Homo Sapiens
FASYMEQHL

SEQ ID NO: 158313 - protein, 9 aa, Homo Sapiens
FATEGLRTL

SEQ ID NO: 158314 - protein, 9 aa, Homo Sapiens
FATLRWIDY

SEQ ID NO: 158315 - protein, 9 aa, Homo Sapiens
FATPFLVVR

SEQ ID NO: 158316 - protein, 9 aa, Homo Sapiens
FAVAIYAVY

SEQ ID NO: 158317 - protein, 9 aa, Homo Sapiens
FAVALPQLL

SEQ ID NO: 158318 - protein, 9 aa, Homo Sapiens
FAVGICNKI

SEQ ID NO: 158319 - protein, 9 aa, Homo Sapiens
FAVGVEKNW

SEQ ID NO: 158320 - protein, 9 aa, Homo Sapiens
FAVNKKIEF

SEQ ID NO: 158321 - protein, 9 aa, Homo Sapiens
FAVNMFRTL

SEQ ID NO: 158322 - protein, 9 aa, Homo Sapiens
FAVSRLIYW

SEQ ID NO: 158323 - protein, 9 aa, Homo Sapiens
FAVSVPLRV

SEQ ID NO: 158324 - protein, 9 aa, Homo Sapiens
FAVYIHALL

SEQ ID NO: 158325 - protein, 9 aa, Homo Sapiens
FAWPKILKI

SEQ ID NO: 158326 - protein, 9 aa, Homo Sapiens
FAYEGPMYL

SEQ ID NO: 158327 - protein, 9 aa, Homo Sapiens
FAYEQCLLV

SEQ ID NO: 158328 - protein, 9 aa, Homo Sapiens
FAYGLLMEL

SEQ ID NO: 158329 - protein, 9 aa, Homo Sapiens
FAYHMIETY

SEQ ID NO: 158330 - protein, 9 aa, Homo Sapiens
FAYHYPYTY

SEQ ID NO: 158331 - protein, 9 aa, Homo Sapiens
FAYLRDLLI

SEQ ID NO: 158332 - protein, 9 aa, Homo Sapiens
FAYMPNNSL

SEQ ID NO: 158333 - protein, 9 aa, Homo Sapiens
FAYPAIRYL

SEQ ID NO: 158334 - protein, 9 aa, Homo Sapiens
FAYPAPLEV

SEQ ID NO: 158335 - protein, 9 aa, Homo Sapiens
FAYPIPHTT

SEQ ID NO: 158336 - protein, 9 aa, Homo Sapiens
FAYPSELKA

SEQ ID NO: 158337 - protein, 9 aa, Homo Sapiens
FAYSMVIVP

SEQ ID NO: 158338 - protein, 9 aa, Homo Sapiens
FAYSSRIAI

SEQ ID NO: 158339 - protein, 9 aa, Homo Sapiens
FAYTAKLIL

SEQ ID NO: 158340 - protein, 9 aa, Homo Sapiens
FAYTARISV

SEQ ID NO: 158341 - protein, 9 aa, Homo Sapiens
FAYTRLQLL

SEQ ID NO: 158342 - protein, 9 aa, Homo Sapiens
FAYTSRHEI

SEQ ID NO: 158343 - protein, 9 aa, Homo Sapiens
FAYTSRIVV

SEQ ID NO: 158344 - protein, 9 aa, Homo Sapiens
FAYTVKYVL

SEQ ID NO: 158345 - protein, 9 aa, Homo Sapiens
FAYVQERRF

SEQ ID NO: 158346 - protein, 9 aa, Homo Sapiens
FAYYKLNDL

SEQ ID NO: 158347 - protein, 9 aa, Homo Sapiens
FAYYRDLVF

SEQ ID NO: 158348 - protein, 9 aa, Homo Sapiens
FAYYRVGEY

SEQ ID NO: 158349 - protein, 9 aa, Homo Sapiens
FFAGLVPRL

SEQ ID NO: 158350 - protein, 9 aa, Homo Sapiens
FFALPFSSM

SEQ ID NO: 158351 - protein, 9 aa, Homo Sapiens
FFFTARTSF

SEQ ID NO: 158352 - protein, 9 aa, Homo Sapiens
FFIAGRYEF

SEQ ID NO: 158353 - protein, 9 aa, Homo Sapiens
FFMEKRAKY

SEQ ID NO: 158354 - protein, 9 aa, Homo Sapiens
FFPDFIWTV

SEQ ID NO: 158355 - protein, 9 aa, Homo Sapiens
FFYQRLVEF

SEQ ID NO: 158356 - protein, 9 aa, Homo Sapiens
FFYTHLINF

SEQ ID NO: 158357 - protein, 9 aa, Homo Sapiens
FGAQSVRVL

SEQ ID NO: 158358 - protein, 9 aa, Homo Sapiens
FGFHKPKMY

SEQ ID NO: 158359 - protein, 9 aa, Homo Sapiens
FGIPFLLRI

SEQ ID NO: 158360 - protein, 9 aa, Homo Sapiens
FGITFPLLL

SEQ ID NO: 158361 - protein, 9 aa, Homo Sapiens
FGSEFSPEL

SEQ ID NO: 158362 - protein, 9 aa, Homo Sapiens
FGTFLVQEL

SEQ ID NO: 158363 - protein, 9 aa, Homo Sapiens
FGVDRAILY

SEQ ID NO: 158364 - protein, 9 aa, Homo Sapiens
FGVPLIVHV

SEQ ID NO: 158365 - protein, 9 aa, Homo Sapiens
FGYDKPHVL

SEQ ID NO: 158366 - protein, 9 aa, Homo Sapiens
FGYDYPSVL

SEQ ID NO: 158367 - protein, 9 aa, Homo Sapiens
FGYEPTIYY

SEQ ID NO: 158368 - protein, 9 aa, Homo Sapiens
FGYGLPMLV

SEQ ID NO: 158369 - protein, 9 aa, Homo Sapiens
FGYPDPTYL

SEQ ID NO: 158370 - protein, 9 aa, Homo Sapiens
FGYPKRLIM

SEQ ID NO: 158371 - protein, 9 aa, Homo Sapiens
FIADHCPTL

SEQ ID NO: 158372 - protein, 9 aa, Homo Sapiens
FIAPTGHSL

SEQ ID NO: 158373 - protein, 9 aa, Homo Sapiens
FICDHPQIM

SEQ ID NO: 158374 - protein, 9 aa, Homo Sapiens
FIHNFVEVL

SEQ ID NO: 158375 - protein, 9 aa, Homo Sapiens
FIIDDKGIL

SEQ ID NO: 158376 - protein, 9 aa, Homo Sapiens
FIIPNVVKY

SEQ ID NO: 158377 - protein, 9 aa, Homo Sapiens
FIIPQIVKY

SEQ ID NO: 158378 - protein, 9 aa, Homo Sapiens
FIIQGLRSV

SEQ ID NO: 158379 - protein, 9 aa, Homo Sapiens
FILHFEPVL

SEQ ID NO: 158380 - protein, 9 aa, Homo Sapiens
FINGDISSL

SEQ ID NO: 158381 - protein, 9 aa, Homo Sapiens
FINNINSVL

SEQ ID NO: 158382 - protein, 9 aa, Homo Sapiens
FINPKPITY

SEQ ID NO: 158383 - protein, 9 aa, Homo Sapiens
FINSRIITV

SEQ ID NO: 158384 - protein, 9 aa, Homo Sapiens
FIQSIISTV

SEQ ID NO: 158385 - protein, 9 aa, Homo Sapiens
FIRPWCTSL

SEQ ID NO: 158386 - protein, 9 aa, Homo Sapiens
FITGLIRIM

SEQ ID NO: 158387 - protein, 9 aa, Homo Sapiens
FIYHLPQEF

SEQ ID NO: 158388 - protein, 9 aa, Homo Sapiens
FLADIVQKL

SEQ ID NO: 158389 - protein, 9 aa, Homo Sapiens
FLANVSTVL

SEQ ID NO: 158390 - protein, 9 aa, Homo Sapiens
FLAPLVTEY

SEQ ID NO: 158391 - protein, 9 aa, Homo Sapiens
FLAPWATIA

SEQ ID NO: 158392 - protein, 9 aa, Homo Sapiens
FLCPFHLSV

SEQ ID NO: 158393 - protein, 9 aa, Homo Sapiens
FLFDGSPTY

SEQ ID NO: 158394 - protein, 9 aa, Homo Sapiens
FLFDHLLTL

SEQ ID NO: 158395 - protein, 9 aa, Homo Sapiens
FLFDKVVIV

SEQ ID NO: 158396 - protein, 9 aa, Homo Sapiens
FLFDRPMHV

SEQ ID NO: 158397 - protein, 9 aa, Homo Sapiens
FLIPFVITV

SEQ ID NO: 158398 - protein, 9 aa, Homo Sapiens
FLKDLVASV

SEQ ID NO: 158399 - protein, 9 aa, Homo Sapiens
FLLPIVVRY

SEQ ID NO: 158400 - protein, 9 aa, Homo Sapiens
FLNQPHMVL

SEQ ID NO: 158401 - protein, 9 aa, Homo Sapiens
FLPDHPIVL

SEQ ID NO: 158402 - protein, 9 aa, Homo Sapiens
FLPPYTFQI

SEQ ID NO: 158403 - protein, 9 aa, Homo Sapiens
FLREWVESM

SEQ ID NO: 158404 - protein, 9 aa, Homo Sapiens
FLVEHVLTL

SEQ ID NO: 158405 - protein, 9 aa, Homo Sapiens
FLYDNLIIF

SEQ ID NO: 158406 - protein, 9 aa, Homo Sapiens
FLYPFFGVL

SEQ ID NO: 158407 - protein, 9 aa, Homo Sapiens
FLYPFPLAL

SEQ ID NO: 158408 - protein, 9 aa, Homo Sapiens
FLYPWKKEF

SEQ ID NO: 158409 - protein, 9 aa, Homo Sapiens
FMKPGTLYV

SEQ ID NO: 158410 - protein, 9 aa, Homo Sapiens
FNFWRAPIA

SEQ ID NO: 158411 - protein, 9 aa, Homo Sapiens
FPYPFQVVY

SEQ ID NO: 158412 - protein, 9 aa, Homo Sapiens
FQAEIAQLM

SEQ ID NO: 158413 - protein, 9 aa, Homo Sapiens
FQAFLRTEF

SEQ ID NO: 158414 - protein, 9 aa, Homo Sapiens
FQIGKMRYV

SEQ ID NO: 158415 - protein, 9 aa, Homo Sapiens
FQIMNEIVY

SEQ ID NO: 158416 - protein, 9 aa, Homo Sapiens
FQKPFQTLM

SEQ ID NO: 158417 - protein, 9 aa, Homo Sapiens
FQNIRPLFI

SEQ ID NO: 158418 - protein, 9 aa, Homo Sapiens
FQNPQTHVI

SEQ ID NO: 158419 - protein, 9 aa, Homo Sapiens
FQSMLHPVM

SEQ ID NO: 158420 - protein, 9 aa, Homo Sapiens
FQYESKVFY

SEQ ID NO: 158421 - protein, 9 aa, Homo Sapiens
FQYPDTRYL

SEQ ID NO: 158422 - protein, 9 aa, Homo Sapiens
FSAEFLKVF

SEQ ID NO: 158423 - protein, 9 aa, Homo Sapiens
FSAFLEKEY

SEQ ID NO: 158424 - protein, 9 aa, Homo Sapiens
FSALLIKCL

SEQ ID NO: 158425 - protein, 9 aa, Homo Sapiens
FSATLPKLL

SEQ ID NO: 158426 - protein, 9 aa, Homo Sapiens
FSAVMVRLM

SEQ ID NO: 158427 - protein, 9 aa, Homo Sapiens
FSAYNYRTY

SEQ ID NO: 158428 - protein, 9 aa, Homo Sapiens
FSEPFHLIV

SEQ ID NO: 158429 - protein, 9 aa, Homo Sapiens
FSFDGPEIM

SEQ ID NO: 158430 - protein, 9 aa, Homo Sapiens
FSFDYIVKW

SEQ ID NO: 158431 - protein, 9 aa, Homo Sapiens
FSFFDLIRY

SEQ ID NO: 158432 - protein, 9 aa, Homo Sapiens
FSFGYALVY

SEQ ID NO: 158433 - protein, 9 aa, Homo Sapiens
FSFHFPVCV

SEQ ID NO: 158434 - protein, 9 aa, Homo Sapiens
FSFHHVLSL

SEQ ID NO: 158435 - protein, 9 aa, Homo Sapiens
FSFHVVKVY

SEQ ID NO: 158436 - protein, 9 aa, Homo Sapiens
FSFKKPFKL

SEQ ID NO: 158437 - protein, 9 aa, Homo Sapiens
FSFPFQTYY

SEQ ID NO: 158438 - protein, 9 aa, Homo Sapiens
FSFPGELLM

SEQ ID NO: 158439 - protein, 9 aa, Homo Sapiens
FSFPHKFEI

SEQ ID NO: 158440 - protein, 9 aa, Homo Sapiens
FSFQRPLLV

SEQ ID NO: 158441 - protein, 9 aa, Homo Sapiens
FSFSGVNRL

SEQ ID NO: 158442 - protein, 9 aa, Homo Sapiens
FSFVRVISL

SEQ ID NO: 158443 - protein, 9 aa, Homo Sapiens
FSGPPEPVL

SEQ ID NO: 158444 - protein, 9 aa, Homo Sapiens
FSHAQTVVL

SEQ ID NO: 158445 - protein, 9 aa, Homo Sapiens
FSIDRALNV

SEQ ID NO: 158446 - protein, 9 aa, Homo Sapiens
FSIEPWLKV

SEQ ID NO: 158447 - protein, 9 aa, Homo Sapiens
FSIPFAPHI

SEQ ID NO: 158448 - protein, 9 aa, Homo Sapiens
FSIPYIISY

SEQ ID NO: 158449 - protein, 9 aa, Homo Sapiens
FSKAKPSVL

SEQ ID NO: 158450 - protein, 9 aa, Homo Sapiens
FSKDIFSVI

SEQ ID NO: 158451 - protein, 9 aa, Homo Sapiens
FSMYKPITY

SEQ ID NO: 158452 - protein, 9 aa, Homo Sapiens
FSNDIPHVV

SEQ ID NO: 158453 - protein, 9 aa, Homo Sapiens
FSNGHIKVL

SEQ ID NO: 158454 - protein, 9 aa, Homo Sapiens
FSNPNIQKI

SEQ ID NO: 158455 - protein, 9 aa, Homo Sapiens
FSNPYSIEY

SEQ ID NO: 158456 - protein, 9 aa, Homo Sapiens
FSQDHLVIY

SEQ ID NO: 158457 - protein, 9 aa, Homo Sapiens
FSSCLHQVL

SEQ ID NO: 158458 - protein, 9 aa, Homo Sapiens
FSSDLISIH

SEQ ID NO: 158459 - protein, 9 aa, Homo Sapiens
FSSENVKVF

SEQ ID NO: 158460 - protein, 9 aa, Homo Sapiens
FSSFVFSTV

SEQ ID NO: 158461 - protein, 9 aa, Homo Sapiens
FSSGAIQVV

SEQ ID NO: 158462 - protein, 9 aa, Homo Sapiens
FSSHILVVV

SEQ ID NO: 158463 - protein, 9 aa, Homo Sapiens
FSSHLINLL

SEQ ID NO: 158464 - protein, 9 aa, Homo Sapiens
FSSPHLLEA

SEQ ID NO: 158465 - protein, 9 aa, Homo Sapiens
FSSPHLQML

SEQ ID NO: 158466 - protein, 9 aa, Homo Sapiens
FSSPHLVQV

SEQ ID NO: 158467 - protein, 9 aa, Homo Sapiens
FSSSSHLII

SEQ ID NO: 158468 - protein, 9 aa, Homo Sapiens
FSTPLLLEA

SEQ ID NO: 158469 - protein, 9 aa, Homo Sapiens
FSVCHILLL

SEQ ID NO: 158470 - protein, 9 aa, Homo Sapiens
FSYAFPKAV

SEQ ID NO: 158471 - protein, 9 aa, Homo Sapiens
FSYAFPKEF

SEQ ID NO: 158472 - protein, 9 aa, Homo Sapiens
FSYGTKILY

SEQ ID NO: 158473 - protein, 9 aa, Homo Sapiens
FTADFVRQL

SEQ ID NO: 158474 - protein, 9 aa, Homo Sapiens
FTADVRSVL

SEQ ID NO: 158475 - protein, 9 aa, Homo Sapiens
FTANQVKIY

SEQ ID NO: 158476 - protein, 9 aa, Homo Sapiens
FTAWRILEV

SEQ ID NO: 158477 - protein, 9 aa, Homo Sapiens
FTFGFIQVM

SEQ ID NO: 158478 - protein, 9 aa, Homo Sapiens
FTFPGCRAL

SEQ ID NO: 158479 - protein, 9 aa, Homo Sapiens
FTFPGNLVT

SEQ ID NO: 158480 - protein, 9 aa, Homo Sapiens
FTFTPTVTY

SEQ ID NO: 158481 - protein, 9 aa, Homo Sapiens
FTGPLRPFF

SEQ ID NO: 158482 - protein, 9 aa, Homo Sapiens
FTHSQFIVV

SEQ ID NO: 158483 - protein, 9 aa, Homo Sapiens
FTIFRTISV

SEQ ID NO: 158484 - protein, 9 aa, Homo Sapiens
FTIPHTQEA

SEQ ID NO: 158485 - protein, 9 aa, Homo Sapiens
FTKWVNSHL

SEQ ID NO: 158486 - protein, 9 aa, Homo Sapiens
FTLPFRIFY

SEQ ID NO: 158487 - protein, 9 aa, Homo Sapiens
FTLWWSPTI

SEQ ID NO: 158488 - protein, 9 aa, Homo Sapiens
FTMEMVRQY

SEQ ID NO: 158489 - protein, 9 aa, Homo Sapiens
FTNPKVREW

SEQ ID NO: 158490 - protein, 9 aa, Homo Sapiens
FTPNNIKQV

SEQ ID NO: 158491 - protein, 9 aa, Homo Sapiens
FTPPVVKRL

SEQ ID NO: 158492 - protein, 9 aa, Homo Sapiens
FTRPEIVVF

SEQ ID NO: 158493 - protein, 9 aa, Homo Sapiens
FTSEKFLVM

SEQ ID NO: 158494 - protein, 9 aa, Homo Sapiens
FTSPAVKRL

SEQ ID NO: 158495 - protein, 9 aa, Homo Sapiens
FTSPFCLQV

SEQ ID NO: 158496 - protein, 9 aa, Homo Sapiens
FTVDQIRAI

SEQ ID NO: 158497 - protein, 9 aa, Homo Sapiens
FTVEQQRIL

SEQ ID NO: 158498 - protein, 9 aa, Homo Sapiens
FTVPHTHVF

SEQ ID NO: 158499 - protein, 9 aa, Homo Sapiens
FTVTFNPKY

SEQ ID NO: 158500 - protein, 9 aa, Homo Sapiens
FTYDQRTEF

SEQ ID NO: 158501 - protein, 9 aa, Homo Sapiens
FTYHHIQEI

SEQ ID NO: 158502 - protein, 9 aa, Homo Sapiens
FTYPYLLAI

SEQ ID NO: 158503 - protein, 9 aa, Homo Sapiens
FVADLQRVI

SEQ ID NO: 158504 - protein, 9 aa, Homo Sapiens
FVFETPFTL

SEQ ID NO: 158505 - protein, 9 aa, Homo Sapiens
FVFPGELLL

SEQ ID NO: 158506 - protein, 9 aa, Homo Sapiens
FVFSTVVIH

SEQ ID NO: 158507 - protein, 9 aa, Homo Sapiens
FVHDLVLYL

SEQ ID NO: 158508 - protein, 9 aa, Homo Sapiens
FVHPDPLWI

SEQ ID NO: 158509 - protein, 9 aa, Homo Sapiens
FVKDSIRLV

SEQ ID NO: 158510 - protein, 9 aa, Homo Sapiens
FVKPAVVTV

SEQ ID NO: 158511 - protein, 9 aa, Homo Sapiens
FVLMASYLI

SEQ ID NO: 158512 - protein, 9 aa, Homo Sapiens
FVNEIISRI

SEQ ID NO: 158513 - protein, 9 aa, Homo Sapiens
FVNPHVSSF

SEQ ID NO: 158514 - protein, 9 aa, Homo Sapiens
FVPVFVAVL

SEQ ID NO: 158515 - protein, 9 aa, Homo Sapiens
FVRDMIREV

SEQ ID NO: 158516 - protein, 9 aa, Homo Sapiens
FVSPLVKYL

SEQ ID NO: 158517 - protein, 9 aa, Homo Sapiens
FVVDHCPYM

SEQ ID NO: 158518 - protein, 9 aa, Homo Sapiens
FVVDHVIKI

SEQ ID NO: 158519 - protein, 9 aa, Homo Sapiens
FVVEHDFIM

SEQ ID NO: 158520 - protein, 9 aa, Homo Sapiens
FVVERQPCM

SEQ ID NO: 158521 - protein, 9 aa, Homo Sapiens
FVYENPISL

SEQ ID NO: 158522 - protein, 9 aa, Homo Sapiens
FVYLRQPYY

SEQ ID NO: 158523 - protein, 9 aa, Homo Sapiens
FWVPFNVVL

SEQ ID NO: 158524 - protein, 9 aa, Homo Sapiens
GAAEIISRI

SEQ ID NO: 158525 - protein, 9 aa, Homo Sapiens
GAFGLPITV

SEQ ID NO: 158526 - protein, 9 aa, Homo Sapiens
GAFSGIQQM

SEQ ID NO: 158527 - protein, 9 aa, Homo Sapiens
GAISKIFVL

SEQ ID NO: 158528 - protein, 9 aa, Homo Sapiens
GASFLLKVW

SEQ ID NO: 158529 - protein, 9 aa, Homo Sapiens
GASQLFRIW

SEQ ID NO: 158530 - protein, 9 aa, Homo Sapiens
GAVDRVLQV

SEQ ID NO: 158531 - protein, 9 aa, Homo Sapiens
GAYEQVIKY

SEQ ID NO: 158532 - protein, 9 aa, Homo Sapiens
GAYGKVFLV

SEQ ID NO: 158533 - protein, 9 aa, Homo Sapiens
GAYGQAVRY

SEQ ID NO: 158534 - protein, 9 aa, Homo Sapiens
GAYKYIQEL

SEQ ID NO: 158535 - protein, 9 aa, Homo Sapiens
GAYTVTIKY

SEQ ID NO: 158536 - protein, 9 aa, Homo Sapiens
GIPEFWLTV

SEQ ID NO: 158537 - protein, 9 aa, Homo Sapiens
GSFGRVMLV

SEQ ID NO: 158538 - protein, 9 aa, Homo Sapiens
GTPPWVKRY

SEQ ID NO: 158539 - protein, 9 aa, Homo Sapiens
GTVQILIKV

SEQ ID NO: 158540 - protein, 9 aa, Homo Sapiens
GVISKIIIF

SEQ ID NO: 158541 - protein, 9 aa, Homo Sapiens
HAAELIKTV

SEQ ID NO: 158542 - protein, 9 aa, Homo Sapiens
HAAHIISEL

SEQ ID NO: 158543 - protein, 9 aa, Homo Sapiens
HAAKVILQV

SEQ ID NO: 158544 - protein, 9 aa, Homo Sapiens
HAAPCMLFM

SEQ ID NO: 158545 - protein, 9 aa, Homo Sapiens
HAAPFQNIL

SEQ ID NO: 158546 - protein, 9 aa, Homo Sapiens
HAAPFSKVL

SEQ ID NO: 158547 - protein, 9 aa, Homo Sapiens
HAASTVQIL

SEQ ID NO: 158548 - protein, 9 aa, Homo Sapiens
HAASVFLTL

SEQ ID NO: 158549 - protein, 9 aa, Homo Sapiens
HACGVIATI

SEQ ID NO: 158550 - protein, 9 aa, Homo Sapiens
HAFPYIKTR

SEQ ID NO: 158551 - protein, 9 aa, Homo Sapiens
HAFSFPLLI

SEQ ID NO: 158552 - protein, 9 aa, Homo Sapiens
HAFWGGSVV

SEQ ID NO: 158553 - protein, 9 aa, Homo Sapiens
HAIDHRLSI

SEQ ID NO: 158554 - protein, 9 aa, Homo Sapiens
HAIKSVKIY

SEQ ID NO: 158555 - protein, 9 aa, Homo Sapiens
HAMQFPAEL

SEQ ID NO: 158556 - protein, 9 aa, Homo Sapiens
HATIIPKVL

SEQ ID NO: 158557 - protein, 9 aa, Homo Sapiens
HAVEWPVVM

SEQ ID NO: 158558 - protein, 9 aa, Homo Sapiens
HAVHVALVL

SEQ ID NO: 158559 - protein, 9 aa, Homo Sapiens
HAYIHSVQF

SEQ ID NO: 158560 - protein, 9 aa, Homo Sapiens
HAYPLIQEA

SEQ ID NO: 158561 - protein, 9 aa, Homo Sapiens
HAYPYPQMY

SEQ ID NO: 158562 - protein, 9 aa, Homo Sapiens
HFIFFVQEF

SEQ ID NO: 158563 - protein, 9 aa, Homo Sapiens
HFSIAFIIY

SEQ ID NO: 158564 - protein, 9 aa, Homo Sapiens
HGFAGVILI

SEQ ID NO: 158565 - protein, 9 aa, Homo Sapiens
HGLIRKYGL

SEQ ID NO: 158566 - protein, 9 aa, Homo Sapiens
HIISFTVKY

SEQ ID NO: 158567 - protein, 9 aa, Homo Sapiens
HLPDFCMLM

SEQ ID NO: 158568 - protein, 9 aa, Homo Sapiens
HQIDLIVQL

SEQ ID NO: 158569 - protein, 9 aa, Homo Sapiens
HQSGIVQLL

SEQ ID NO: 158570 - protein, 9 aa, Homo Sapiens
HQSTVDWIV

SEQ ID NO: 158571 - protein, 9 aa, Homo Sapiens
HSAPFSWET

SEQ ID NO: 158572 - protein, 9 aa, Homo Sapiens
HSFLKALYY

SEQ ID NO: 158573 - protein, 9 aa, Homo Sapiens
HSFNIPMQL

SEQ ID NO: 158574 - protein, 9 aa, Homo Sapiens
HSFSGVQRF

SEQ ID NO: 158575 - protein, 9 aa, Homo Sapiens
HSYELLVEY

SEQ ID NO: 158576 - protein, 9 aa, Homo Sapiens
HTFWGVVFF

SEQ ID NO: 158577 - protein, 9 aa, Homo Sapiens
HTFYEAVGY

SEQ ID NO: 158578 - protein, 9 aa, Homo Sapiens
HTFYNELRV

SEQ ID NO: 158579 - protein, 9 aa, Homo Sapiens
HTIDTILTV

SEQ ID NO: 158580 - protein, 9 aa, Homo Sapiens
HTQGFIITF

SEQ ID NO: 158581 - protein, 9 aa, Homo Sapiens
HTVGFILQL

SEQ ID NO: 158582 - protein, 9 aa, Homo Sapiens
HTWNGIRHL

SEQ ID NO: 158583 - protein, 9 aa, Homo Sapiens
HVFDHPWET

SEQ ID NO: 158584 - protein, 9 aa, Homo Sapiens
HVFWGIVFF

SEQ ID NO: 158585 - protein, 9 aa, Homo Sapiens
HVINHILKA

SEQ ID NO: 158586 - protein, 9 aa, Homo Sapiens
HVPDWVWIV

SEQ ID NO: 158587 - protein, 9 aa, Homo Sapiens
HVYEIPVEY

SEQ ID NO: 158588 - protein, 9 aa, Homo Sapiens
IAAGIFNDL

SEQ ID NO: 158589 - protein, 9 aa, Homo Sapiens
IAAGLYLLL

SEQ ID NO: 158590 - protein, 9 aa, Homo Sapiens
IAAKKVLRL

SEQ ID NO: 158591 - protein, 9 aa, Homo Sapiens
IAAMPLISL

SEQ ID NO: 158592 - protein, 9 aa, Homo Sapiens
IAAPFTSKL

SEQ ID NO: 158593 - protein, 9 aa, Homo Sapiens
IAASYVKYL

SEQ ID NO: 158594 - protein, 9 aa, Homo Sapiens
IAFEFPVLV

SEQ ID NO: 158595 - protein, 9 aa, Homo Sapiens
IAFFDVRTF

SEQ ID NO: 158596 - protein, 9 aa, Homo Sapiens
IAFFTTASV

SEQ ID NO: 158597 - protein, 9 aa, Homo Sapiens
IAFGFHQLY

SEQ ID NO: 158598 - protein, 9 aa, Homo Sapiens
IAFHFRVYF

SEQ ID NO: 158599 - protein, 9 aa, Homo Sapiens
IAFHSAVSL

SEQ ID NO: 158600 - protein, 9 aa, Homo Sapiens
IAFPFRHDL

SEQ ID NO: 158601 - protein, 9 aa, Homo Sapiens
IAFPKAEEL

SEQ ID NO: 158602 - protein, 9 aa, Homo Sapiens
IAFPSANEV

SEQ ID NO: 158603 - protein, 9 aa, Homo Sapiens
IAFPTSISV

SEQ ID NO: 158604 - protein, 9 aa, Homo Sapiens
IAFQQAQYI

SEQ ID NO: 158605 - protein, 9 aa, Homo Sapiens
IAFSRPVKY

SEQ ID NO: 158606 - protein, 9 aa, Homo Sapiens
IAFWGVRSM

SEQ ID NO: 158607 - protein, 9 aa, Homo Sapiens
IAHVKPSIM

SEQ ID NO: 158608 - protein, 9 aa, Homo Sapiens
IAIDWEPEM

SEQ ID NO: 158609 - protein, 9 aa, Homo Sapiens
IAIEKIRLL

SEQ ID NO: 158610 - protein, 9 aa, Homo Sapiens
IAIGKVLKL

SEQ ID NO: 158611 - protein, 9 aa, Homo Sapiens
IAIIRPSIV

SEQ ID NO: 158612 - protein, 9 aa, Homo Sapiens
IAILIPVVF

SEQ ID NO: 158613 - protein, 9 aa, Homo Sapiens
IAINHTIIT

SEQ ID NO: 158614 - protein, 9 aa, Homo Sapiens
IAIPFLIKL

SEQ ID NO: 158615 - protein, 9 aa, Homo Sapiens
IAIPVTVAF

SEQ ID NO: 158616 - protein, 9 aa, Homo Sapiens
IAISRTPVL

SEQ ID NO: 158617 - protein, 9 aa, Homo Sapiens
IAKDVCTFL

SEQ ID NO: 158618 - protein, 9 aa, Homo Sapiens
IALQYPVYW

SEQ ID NO: 158619 - protein, 9 aa, Homo Sapiens
IAMDLILKM

SEQ ID NO: 158620 - protein, 9 aa, Homo Sapiens
IARLPSSTL

SEQ ID NO: 158621 - protein, 9 aa, Homo Sapiens
IASAIVNEL

SEQ ID NO: 158622 - protein, 9 aa, Homo Sapiens
IASDIVSRF

SEQ ID NO: 158623 - protein, 9 aa, Homo Sapiens
IASFILLRL

SEQ ID NO: 158624 - protein, 9 aa, Homo Sapiens
IASHLHIHV

SEQ ID NO: 158625 - protein, 9 aa, Homo Sapiens
IASPQLLRV

SEQ ID NO: 158626 - protein, 9 aa, Homo Sapiens
IASPVIAAV

SEQ ID NO: 158627 - protein, 9 aa, Homo Sapiens
IASPVQPVL

SEQ ID NO: 158628 - protein, 9 aa, Homo Sapiens
IASTILRLI

SEQ ID NO: 158629 - protein, 9 aa, Homo Sapiens
IASWLVVTV

SEQ ID NO: 158630 - protein, 9 aa, Homo Sapiens
IATEIILEI

SEQ ID NO: 158631 - protein, 9 aa, Homo Sapiens
IATGHLMSV

SEQ ID NO: 158632 - protein, 9 aa, Homo Sapiens
IATPFIKLF

SEQ ID NO: 158633 - protein, 9 aa, Homo Sapiens
IAVALPVVY

SEQ ID NO: 158634 - protein, 9 aa, Homo Sapiens
IAVDMTQHL

SEQ ID NO: 158635 - protein, 9 aa, Homo Sapiens
IAVEFCHVT

SEQ ID NO: 158636 - protein, 9 aa, Homo Sapiens
IAVGLVPQY

SEQ ID NO: 158637 - protein, 9 aa, Homo Sapiens
IAVGTVIRY

SEQ ID NO: 158638 - protein, 9 aa, Homo Sapiens
IAVHVVRVL

SEQ ID NO: 158639 - protein, 9 aa, Homo Sapiens
IAVNAVLTV

SEQ ID NO: 158640 - protein, 9 aa, Homo Sapiens
IAVSIVRAL

SEQ ID NO: 158641 - protein, 9 aa, Homo Sapiens
IAYDNIKVV

SEQ ID NO: 158642 - protein, 9 aa, Homo Sapiens
IAYDVTYSL

SEQ ID NO: 158643 - protein, 9 aa, Homo Sapiens
IAYFHPQKL

SEQ ID NO: 158644 - protein, 9 aa, Homo Sapiens
IAYPHLRIR

SEQ ID NO: 158645 - protein, 9 aa, Homo Sapiens
IAYPKAVTM

SEQ ID NO: 158646 - protein, 9 aa, Homo Sapiens
IAYQKQVIR

SEQ ID NO: 158647 - protein, 9 aa, Homo Sapiens
IAYSRPVYF

SEQ ID NO: 158648 - protein, 9 aa, Homo Sapiens
IFYEFRSYY

SEQ ID NO: 158649 - protein, 9 aa, Homo Sapiens
IGMPVEKRY

SEQ ID NO: 158650 - protein, 9 aa, Homo Sapiens
IGVDFALKV

SEQ ID NO: 158651 - protein, 9 aa, Homo Sapiens
IGVEHVVVY

SEQ ID NO: 158652 - protein, 9 aa, Homo Sapiens
IGYPITLYL

SEQ ID NO: 158653 - protein, 9 aa, Homo Sapiens
IGYPMPTGY

SEQ ID NO: 158654 - protein, 9 aa, Homo Sapiens
IGYSSPLTL

SEQ ID NO: 158655 - protein, 9 aa, Homo Sapiens
IIFETPLRV

SEQ ID NO: 158656 - protein, 9 aa, Homo Sapiens
IIPSWPLKV

SEQ ID NO: 158657 - protein, 9 aa, Homo Sapiens
IIQSIRMGM

SEQ ID NO: 158658 - protein, 9 aa, Homo Sapiens
IIYGDPVTF

SEQ ID NO: 158659 - protein, 9 aa, Homo Sapiens
IIYPTPKVV

SEQ ID NO: 158660 - protein, 9 aa, Homo Sapiens
ILFSGVHFY

SEQ ID NO: 158661 - protein, 9 aa, Homo Sapiens
ILPPFIWTL

SEQ ID NO: 158662 - protein, 9 aa, Homo Sapiens
IQAAIVRIM

SEQ ID NO: 158663 - protein, 9 aa, Homo Sapiens
IQFKKPIIV

SEQ ID NO: 158664 - protein, 9 aa, Homo Sapiens
IQYIRPVFV

SEQ ID NO: 158665 - protein, 9 aa, Homo Sapiens
ISAELIRSL

SEQ ID NO: 158666 - protein, 9 aa, Homo Sapiens
ISAPLVKTL

SEQ ID NO: 158667 - protein, 9 aa, Homo Sapiens
ISCPKPSII

SEQ ID NO: 158668 - protein, 9 aa, Homo Sapiens
ISFPAPLYI

SEQ ID NO: 158669 - protein, 9 aa, Homo Sapiens
ISFPDPKML

SEQ ID NO: 158670 - protein, 9 aa, Homo Sapiens
ISKSPWTCL

SEQ ID NO: 158671 - protein, 9 aa, Homo Sapiens
ISRDKPITF

SEQ ID NO: 158672 - protein, 9 aa, Homo Sapiens
ISREHPWEV

SEQ ID NO: 158673 - protein, 9 aa, Homo Sapiens
ISSGLILSV

SEQ ID NO: 158674 - protein, 9 aa, Homo Sapiens
ISSHIPLII

SEQ ID NO: 158675 - protein, 9 aa, Homo Sapiens
ISSPVVTSL

SEQ ID NO: 158676 - protein, 9 aa, Homo Sapiens
ISTPVIRTF

SEQ ID NO: 158677 - protein, 9 aa, Homo Sapiens
ISVDGVVYY

SEQ ID NO: 158678 - protein, 9 aa, Homo Sapiens
ISVERVIEY

SEQ ID NO: 158679 - protein, 9 aa, Homo Sapiens
ITAEILREL

SEQ ID NO: 158680 - protein, 9 aa, Homo Sapiens
ITFPGIKLI

SEQ ID NO: 158681 - protein, 9 aa, Homo Sapiens
ITFPGLHEL

SEQ ID NO: 158682 - protein, 9 aa, Homo Sapiens
ITFPIIVHF

SEQ ID NO: 158683 - protein, 9 aa, Homo Sapiens
ITGPLIRIL

SEQ ID NO: 158684 - protein, 9 aa, Homo Sapiens
ITTDCLQIL

SEQ ID NO: 158685 - protein, 9 aa, Homo Sapiens
ITTTINPRF

SEQ ID NO: 158686 - protein, 9 aa, Homo Sapiens
ITTTVTRVL

SEQ ID NO: 158687 - protein, 9 aa, Homo Sapiens
ITYGLPIMV

SEQ ID NO: 158688 - protein, 9 aa, Homo Sapiens
IVADILLYV

SEQ ID NO: 158689 - protein, 9 aa, Homo Sapiens
IVATKPLYV

SEQ ID NO: 158690 - protein, 9 aa, Homo Sapiens
IVIGIIKTV

SEQ ID NO: 158691 - protein, 9 aa, Homo Sapiens
IVINHVISV

SEQ ID NO: 158692 - protein, 9 aa, Homo Sapiens
IVYPGIAVF

SEQ ID NO: 158693 - protein, 9 aa, Homo Sapiens
KAADFVKAF

SEQ ID NO: 158694 - protein, 9 aa, Homo Sapiens
KAAGFISVL

SEQ ID NO: 158695 - protein, 9 aa, Homo Sapiens
KAAHFFSTL

SEQ ID NO: 158696 - protein, 9 aa, Homo Sapiens
KAASQILIL

SEQ ID NO: 158697 - protein, 9 aa, Homo Sapiens
KAASVRPVL

SEQ ID NO: 158698 - protein, 9 aa, Homo Sapiens
KAAVMVHQL

SEQ ID NO: 158699 - protein, 9 aa, Homo Sapiens
KACDYIQEL

SEQ ID NO: 158700 - protein, 9 aa, Homo Sapiens
KACDYIREL

SEQ ID NO: 158701 - protein, 9 aa, Homo Sapiens
KAFAEQIFY

SEQ ID NO: 158702 - protein, 9 aa, Homo Sapiens
KAFAQLFIL

SEQ ID NO: 158703 - protein, 9 aa, Homo Sapiens
KAFARPWSL

SEQ ID NO: 158704 - protein, 9 aa, Homo Sapiens
KAFDRPSLF

SEQ ID NO: 158705 - protein, 9 aa, Homo Sapiens
KAFEHLQQL

SEQ ID NO: 158706 - protein, 9 aa, Homo Sapiens
KAFEYNMQI

SEQ ID NO: 158707 - protein, 9 aa, Homo Sapiens
KAFFAKMVV

SEQ ID NO: 158708 - protein, 9 aa, Homo Sapiens
KAFFRWLYV

SEQ ID NO: 158709 - protein, 9 aa, Homo Sapiens
KAFGKQSIL

SEQ ID NO: 158710 - protein, 9 aa, Homo Sapiens
KAFKGSIFV

SEQ ID NO: 158711 - protein, 9 aa, Homo Sapiens
KAFLTIIIL

SEQ ID NO: 158712 - protein, 9 aa, Homo Sapiens
KAFMYPYTL

SEQ ID NO: 158713 - protein, 9 aa, Homo Sapiens
KAFNHPATL

SEQ ID NO: 158714 - protein, 9 aa, Homo Sapiens
KAFNLRISF

SEQ ID NO: 158715 - protein, 9 aa, Homo Sapiens
KAFPEHFTY

SEQ ID NO: 158716 - protein, 9 aa, Homo Sapiens
KAFPFHIIF

SEQ ID NO: 158717 - protein, 9 aa, Homo Sapiens
KAFPKAYLL

SEQ ID NO: 158718 - protein, 9 aa, Homo Sapiens
KAFQKIVVL

SEQ ID NO: 158719 - protein, 9 aa, Homo Sapiens
KAFQKLITV

SEQ ID NO: 158720 - protein, 9 aa, Homo Sapiens
KAFSVVIQA

SEQ ID NO: 158721 - protein, 9 aa, Homo Sapiens
KAIDFAASL

SEQ ID NO: 158722 - protein, 9 aa, Homo Sapiens
KAIDVVVMV

SEQ ID NO: 158723 - protein, 9 aa, Homo Sapiens
KAIDYIKYL

SEQ ID NO: 158724 - protein, 9 aa, Homo Sapiens
KAIDYIRFL

SEQ ID NO: 158725 - protein, 9 aa, Homo Sapiens
KAIEKNVLF

SEQ ID NO: 158726 - protein, 9 aa, Homo Sapiens
KAIELLQEF

SEQ ID NO: 158727 - protein, 9 aa, Homo Sapiens
KAIELQLQV

SEQ ID NO: 158728 - protein, 9 aa, Homo Sapiens
KAIEVLLTL

SEQ ID NO: 158729 - protein, 9 aa, Homo Sapiens
KAISGVHTV

SEQ ID NO: 158730 - protein, 9 aa, Homo Sapiens
KAITFVTQY

SEQ ID NO: 158731 - protein, 9 aa, Homo Sapiens
KAKDPFAHL

SEQ ID NO: 158732 - protein, 9 aa, Homo Sapiens
KAMELIREL

SEQ ID NO: 158733 - protein, 9 aa, Homo Sapiens
KANITFEYM

SEQ ID NO: 158734 - protein, 9 aa, Homo Sapiens
KAPDFVFYA

SEQ ID NO: 158735 - protein, 9 aa, Homo Sapiens
KAQNKPFYV

SEQ ID NO: 158736 - protein, 9 aa, Homo Sapiens
KASEKILQV

SEQ ID NO: 158737 - protein, 9 aa, Homo Sapiens
KASHILISV

SEQ ID NO: 158738 - protein, 9 aa, Homo Sapiens
KASPLTFTV

SEQ ID NO: 158739 - protein, 9 aa, Homo Sapiens
KATAYILSV

SEQ ID NO: 158740 - protein, 9 aa, Homo Sapiens
KATEYIQYM

SEQ ID NO: 158741 - protein, 9 aa, Homo Sapiens
KATFIIKII

SEQ ID NO: 158742 - protein, 9 aa, Homo Sapiens
KATNVVRLL

SEQ ID NO: 158743 - protein, 9 aa, Homo Sapiens
KATPLVLKA

SEQ ID NO: 158744 - protein, 9 aa, Homo Sapiens
KAVDIVKQV

SEQ ID NO: 158745 - protein, 9 aa, Homo Sapiens
KAVEIYASV

SEQ ID NO: 158746 - protein, 9 aa, Homo Sapiens
KAVELLVEL

SEQ ID NO: 158747 - protein, 9 aa, Homo Sapiens
KAVGWRLIA

SEQ ID NO: 158748 - protein, 9 aa, Homo Sapiens
KAVHVIYTV

SEQ ID NO: 158749 - protein, 9 aa, Homo Sapiens
KAVSFHLVH

SEQ ID NO: 158750 - protein, 9 aa, Homo Sapiens
KAVSLFLCY

SEQ ID NO: 158751 - protein, 9 aa, Homo Sapiens
KAVSLINAI

SEQ ID NO: 158752 - protein, 9 aa, Homo Sapiens
KAVTHQVKF

SEQ ID NO: 158753 - protein, 9 aa, Homo Sapiens
KAVVFFVFY

SEQ ID NO: 158754 - protein, 9 aa, Homo Sapiens
KAWFLPIMY

SEQ ID NO: 158755 - protein, 9 aa, Homo Sapiens
KAWPLLLVV

SEQ ID NO: 158756 - protein, 9 aa, Homo Sapiens
KAYEKILFT

SEQ ID NO: 158757 - protein, 9 aa, Homo Sapiens
KAYEKLQIL

SEQ ID NO: 158758 - protein, 9 aa, Homo Sapiens
KAYELALYL

SEQ ID NO: 158759 - protein, 9 aa, Homo Sapiens
KAYFDVKEY

SEQ ID NO: 158760 - protein, 9 aa, Homo Sapiens
KAYGKDFHL

SEQ ID NO: 158761 - protein, 9 aa, Homo Sapiens
KAYHEQLSV

SEQ ID NO: 158762 - protein, 9 aa, Homo Sapiens
KAYHEQLTV

SEQ ID NO: 158763 - protein, 9 aa, Homo Sapiens
KAYNRVIYV

SEQ ID NO: 158764 - protein, 9 aa, Homo Sapiens
KAYNYIRIM

SEQ ID NO: 158765 - protein, 9 aa, Homo Sapiens
KAYPFPLSH

SEQ ID NO: 158766 - protein, 9 aa, Homo Sapiens
KGFDWPLLV

SEQ ID NO: 158767 - protein, 9 aa, Homo Sapiens
KGIGHVIKV

SEQ ID NO: 158768 - protein, 9 aa, Homo Sapiens
KGIPHLVTH

SEQ ID NO: 158769 - protein, 9 aa, Homo Sapiens
KGSGVVIIM

SEQ ID NO: 158770 - protein, 9 aa, Homo Sapiens
KIADFGWSV

SEQ ID NO: 158771 - protein, 9 aa, Homo Sapiens
KIFPSVIKY

SEQ ID NO: 158772 - protein, 9 aa, Homo Sapiens
KIIPLVVKF

SEQ ID NO: 158773 - protein, 9 aa, Homo Sapiens
KIPNFCVLL

SEQ ID NO: 158774 - protein, 9 aa, Homo Sapiens
KIPNFWVTT

SEQ ID NO: 158775 - protein, 9 aa, Homo Sapiens
KISNIIKQF

SEQ ID NO: 158776 - protein, 9 aa, Homo Sapiens
KIVDWAIQV

SEQ ID NO: 158777 - protein, 9 aa, Homo Sapiens
KIVKWDRDM

SEQ ID NO: 158778 - protein, 9 aa, Homo Sapiens
KIYEEPIIL

SEQ ID NO: 158779 - protein, 9 aa, Homo Sapiens
KLASYVKFY

SEQ ID NO: 158780 - protein, 9 aa, Homo Sapiens
KLSDLLKYY

SEQ ID NO: 158781 - protein, 9 aa, Homo Sapiens
KLVDFVIHF

SEQ ID NO: 158782 - protein, 9 aa, Homo Sapiens
KLYGKPIRV

SEQ ID NO: 158783 - protein, 9 aa, Homo Sapiens
KNFDMVIVY

SEQ ID NO: 158784 - protein, 9 aa, Homo Sapiens
KQAEIVKRL

SEQ ID NO: 158785 - protein, 9 aa, Homo Sapiens
KQFEGTVEI

SEQ ID NO: 158786 - protein, 9 aa, Homo Sapiens
KQFGNILIL

SEQ ID NO: 158787 - protein, 9 aa, Homo Sapiens
KQFHLTPVM

SEQ ID NO: 158788 - protein, 9 aa, Homo Sapiens
KQFHRIVTY

SEQ ID NO: 158789 - protein, 9 aa, Homo Sapiens
KQFPEVIKY

SEQ ID NO: 158790 - protein, 9 aa, Homo Sapiens
KQIFETIYY

SEQ ID NO: 158791 - protein, 9 aa, Homo Sapiens
KQYGNEVFL

SEQ ID NO: 158792 - protein, 9 aa, Homo Sapiens
KSFEAPIKL

SEQ ID NO: 158793 - protein, 9 aa, Homo Sapiens
KSFEGLFYF

SEQ ID NO: 158794 - protein, 9 aa, Homo Sapiens
KSFEKLMKI

SEQ ID NO: 158795 - protein, 9 aa, Homo Sapiens
KSFFRRLSF

SEQ ID NO: 158796 - protein, 9 aa, Homo Sapiens
KSIARVLTV

SEQ ID NO: 158797 - protein, 9 aa, Homo Sapiens
KSIDLIQKW

SEQ ID NO: 158798 - protein, 9 aa, Homo Sapiens
KSIHIVVTM

SEQ ID NO: 158799 - protein, 9 aa, Homo Sapiens
KSKDFVQVM

SEQ ID NO: 158800 - protein, 9 aa, Homo Sapiens
KSVDWLLVF

SEQ ID NO: 158801 - protein, 9 aa, Homo Sapiens
KSYLRCITF

SEQ ID NO: 158802 - protein, 9 aa, Homo Sapiens
KSYSKAFTL

SEQ ID NO: 158803 - protein, 9 aa, Homo Sapiens
KTADICQML

SEQ ID NO: 158804 - protein, 9 aa, Homo Sapiens
KTFPEIIDY

SEQ ID NO: 158805 - protein, 9 aa, Homo Sapiens
KTFPYQHRY

SEQ ID NO: 158806 - protein, 9 aa, Homo Sapiens
KTIDYIQFL

SEQ ID NO: 158807 - protein, 9 aa, Homo Sapiens
KTPDFILQV

SEQ ID NO: 158808 - protein, 9 aa, Homo Sapiens
KTTELIRRI

SEQ ID NO: 158809 - protein, 9 aa, Homo Sapiens
KTVNKILQI

SEQ ID NO: 158810 - protein, 9 aa, Homo Sapiens
KTYPCKISY

SEQ ID NO: 158811 - protein, 9 aa, Homo Sapiens
KVANLVKAY

SEQ ID NO: 158812 - protein, 9 aa, Homo Sapiens
KVFGHIRVY

SEQ ID NO: 158813 - protein, 9 aa, Homo Sapiens
KVIELVKKY

SEQ ID NO: 158814 - protein, 9 aa, Homo Sapiens
LAAAMVRVL

SEQ ID NO: 158815 - protein, 9 aa, Homo Sapiens
LAAAVPKIM

SEQ ID NO: 158816 - protein, 9 aa, Homo Sapiens
LAADIFAIA

SEQ ID NO: 158817 - protein, 9 aa, Homo Sapiens
LAADIHQAL

SEQ ID NO: 158818 - protein, 9 aa, Homo Sapiens
LAAEFLKQV

SEQ ID NO: 158819 - protein, 9 aa, Homo Sapiens
LAAIWFRTY

SEQ ID NO: 158820 - protein, 9 aa, Homo Sapiens
LAAPICLLY

SEQ ID NO: 158821 - protein, 9 aa, Homo Sapiens
LAAPLLKRL

SEQ ID NO: 158822 - protein, 9 aa, Homo Sapiens
LAAPMILSL

SEQ ID NO: 158823 - protein, 9 aa, Homo Sapiens
LAAPVISVL

SEQ ID NO: 158824 - protein, 9 aa, Homo Sapiens
LAAQFVKLL

SEQ ID NO: 158825 - protein, 9 aa, Homo Sapiens
LAATFIRSL

SEQ ID NO: 158826 - protein, 9 aa, Homo Sapiens
LAAYHPWVV

SEQ ID NO: 158827 - protein, 9 aa, Homo Sapiens
LACGVAKVL

SEQ ID NO: 158828 - protein, 9 aa, Homo Sapiens
LACPLLRQL

SEQ ID NO: 158829 - protein, 9 aa, Homo Sapiens
LAFAREFMA

SEQ ID NO: 158830 - protein, 9 aa, Homo Sapiens
LAFEGPILL

SEQ ID NO: 158831 - protein, 9 aa, Homo Sapiens
LAFESIQKI

SEQ ID NO: 158832 - protein, 9 aa, Homo Sapiens
LAFLRFVVY

SEQ ID NO: 158833 - protein, 9 aa, Homo Sapiens
LAFPAPLYY

SEQ ID NO: 158834 - protein, 9 aa, Homo Sapiens
LAFPGEMLL

SEQ ID NO: 158835 - protein, 9 aa, Homo Sapiens
LAFPVGVFV

SEQ ID NO: 158836 - protein, 9 aa, Homo Sapiens
LAFSRALEL

SEQ ID NO: 158837 - protein, 9 aa, Homo Sapiens
LAGPAEPEL

SEQ ID NO: 158838 - protein, 9 aa, Homo Sapiens
LAIDAIHQL

SEQ ID NO: 158839 - protein, 9 aa, Homo Sapiens
LAIEHVRFF

SEQ ID NO: 158840 - protein, 9 aa, Homo Sapiens
LAIGLLHIV

SEQ ID NO: 158841 - protein, 9 aa, Homo Sapiens
LAINHKLEI

SEQ ID NO: 158842 - protein, 9 aa, Homo Sapiens
LAIPFAITI

SEQ ID NO: 158843 - protein, 9 aa, Homo Sapiens
LAIPNLVIF

SEQ ID NO: 158844 - protein, 9 aa, Homo Sapiens
LAKAWPTVL

SEQ ID NO: 158845 - protein, 9 aa, Homo Sapiens
LAKDGVLTL

SEQ ID NO: 158846 - protein, 9 aa, Homo Sapiens
LAKEFAEIL

SEQ ID NO: 158847 - protein, 9 aa, Homo Sapiens
LALNFSVFY

SEQ ID NO: 158848 - protein, 9 aa, Homo Sapiens
LANGDVWKV

SEQ ID NO: 158849 - protein, 9 aa, Homo Sapiens
LAPGFVIKV

SEQ ID NO: 158850 - protein, 9 aa, Homo Sapiens
LAPNFRWAI

SEQ ID NO: 158851 - protein, 9 aa, Homo Sapiens
LAQAHIQQL

SEQ ID NO: 158852 - protein, 9 aa, Homo Sapiens
LAQPQMMVV

SEQ ID NO: 158853 - protein, 9 aa, Homo Sapiens
LAQQIHPVV

SEQ ID NO: 158854 - protein, 9 aa, Homo Sapiens
LARLFTAYL

SEQ ID NO: 158855 - protein, 9 aa, Homo Sapiens
LASAFFLVV

SEQ ID NO: 158856 - protein, 9 aa, Homo Sapiens
LASAIINTL

SEQ ID NO: 158857 - protein, 9 aa, Homo Sapiens
LASANLRVL

SEQ ID NO: 158858 - protein, 9 aa, Homo Sapiens
LASGLVVFF

SEQ ID NO: 158859 - protein, 9 aa, Homo Sapiens
LASHYIHIV

SEQ ID NO: 158860 - protein, 9 aa, Homo Sapiens
LASLIRSVV

SEQ ID NO: 158861 - protein, 9 aa, Homo Sapiens
LASPPWRVL

SEQ ID NO: 158862 - protein, 9 aa, Homo Sapiens
LASPVSPEL

SEQ ID NO: 158863 - protein, 9 aa, Homo Sapiens
LASQIIKTL

SEQ ID NO: 158864 - protein, 9 aa, Homo Sapiens
LATDFIQSL

SEQ ID NO: 158865 - protein, 9 aa, Homo Sapiens
LATEVVTVF

SEQ ID NO: 158866 - protein, 9 aa, Homo Sapiens
LATLITQFL

SEQ ID NO: 158867 - protein, 9 aa, Homo Sapiens
LATPVVSVA

SEQ ID NO: 158868 - protein, 9 aa, Homo Sapiens
LAVAHPLLL

SEQ ID NO: 158869 - protein, 9 aa, Homo Sapiens
LAVDKIIFV

SEQ ID NO: 158870 - protein, 9 aa, Homo Sapiens
LAVDNILYI

SEQ ID NO: 158871 - protein, 9 aa, Homo Sapiens
LAVEAVLRL

SEQ ID NO: 158872 - protein, 9 aa, Homo Sapiens
LAVNHVFEI

SEQ ID NO: 158873 - protein, 9 aa, Homo Sapiens
LAVNKIKEI

SEQ ID NO: 158874 - protein, 9 aa, Homo Sapiens
LAVNLTRVL

SEQ ID NO: 158875 - protein, 9 aa, Homo Sapiens
LAVPFCVNF

SEQ ID NO: 158876 - protein, 9 aa, Homo Sapiens
LAVPIILRV

SEQ ID NO: 158877 - protein, 9 aa, Homo Sapiens
LAVSLVKVF

SEQ ID NO: 158878 - protein, 9 aa, Homo Sapiens
LAVSRIITW

SEQ ID NO: 158879 - protein, 9 aa, Homo Sapiens
LAVSRVITW

SEQ ID NO: 158880 - protein, 9 aa, Homo Sapiens
LAWQNPHML

SEQ ID NO: 158881 - protein, 9 aa, Homo Sapiens
LAYAEYVIY

SEQ ID NO: 158882 - protein, 9 aa, Homo Sapiens
LAYANLMLL

SEQ ID NO: 158883 - protein, 9 aa, Homo Sapiens
LAYHLAVVL

SEQ ID NO: 158884 - protein, 9 aa, Homo Sapiens
LAYHRLHQL

SEQ ID NO: 158885 - protein, 9 aa, Homo Sapiens
LAYIHLIEF

SEQ ID NO: 158886 - protein, 9 aa, Homo Sapiens
LAYLRTECY

SEQ ID NO: 158887 - protein, 9 aa, Homo Sapiens
LAYMNHIMV

SEQ ID NO: 158888 - protein, 9 aa, Homo Sapiens
LAYNEIITI

SEQ ID NO: 158889 - protein, 9 aa, Homo Sapiens
LAYPDKLVM

SEQ ID NO: 158890 - protein, 9 aa, Homo Sapiens
LAYPNGHYF

SEQ ID NO: 158891 - protein, 9 aa, Homo Sapiens
LAYPNPIDP

SEQ ID NO: 158892 - protein, 9 aa, Homo Sapiens
LAYPTAVNW

SEQ ID NO: 158893 - protein, 9 aa, Homo Sapiens
LAYQKQWEV

SEQ ID NO: 158894 - protein, 9 aa, Homo Sapiens
LAYSGVHLY

SEQ ID NO: 158895 - protein, 9 aa, Homo Sapiens
LAYSGYKYV

SEQ ID NO: 158896 - protein, 9 aa, Homo Sapiens
LFAPFIVYY

SEQ ID NO: 158897 - protein, 9 aa, Homo Sapiens
LGRGKFAVV

SEQ ID NO: 158898 - protein, 9 aa, Homo Sapiens
LGYEEVVLY

SEQ ID NO: 158899 - protein, 9 aa, Homo Sapiens
LGYPWVEYW

SEQ ID NO: 158900 - protein, 9 aa, Homo Sapiens
LIFSVPIVY

SEQ ID NO: 158901 - protein, 9 aa, Homo Sapiens
LIPKFVSFL

SEQ ID NO: 158902 - protein, 9 aa, Homo Sapiens
LIPYWTVYF

SEQ ID NO: 158903 - protein, 9 aa, Homo Sapiens
LIYGRPVYV

SEQ ID NO: 158904 - protein, 9 aa, Homo Sapiens
LIYGTPRAA

SEQ ID NO: 158905 - protein, 9 aa, Homo Sapiens
LLKNPFLSV

SEQ ID NO: 158906 - protein, 9 aa, Homo Sapiens
LMSGKVKVW

SEQ ID NO: 158907 - protein, 9 aa, Homo Sapiens
LMVPVTVVF

SEQ ID NO: 158908 - protein, 9 aa, Homo Sapiens
LMYPYIFHV

SEQ ID NO: 158909 - protein, 9 aa, Homo Sapiens
LQETATWLL

SEQ ID NO: 158910 - protein, 9 aa, Homo Sapiens
LQGPLRDVF

SEQ ID NO: 158911 - protein, 9 aa, Homo Sapiens
LQIGVIRVY

SEQ ID NO: 158912 - protein, 9 aa, Homo Sapiens
LQKEFITTY

SEQ ID NO: 158913 - protein, 9 aa, Homo Sapiens
LSADIFQQV

SEQ ID NO: 158914 - protein, 9 aa, Homo Sapiens
LSAEVYRIL

SEQ ID NO: 158915 - protein, 9 aa, Homo Sapiens
LSAGATKVY

SEQ ID NO: 158916 - protein, 9 aa, Homo Sapiens
LSAPIHTQM

SEQ ID NO: 158917 - protein, 9 aa, Homo Sapiens
LSFFYPVLF

SEQ ID NO: 158918 - protein, 9 aa, Homo Sapiens
LSFPHLLQT

SEQ ID NO: 158919 - protein, 9 aa, Homo Sapiens
LSFPTTKTY

SEQ ID NO: 158920 - protein, 9 aa, Homo Sapiens
LSFPYSYEV

SEQ ID NO: 158921 - protein, 9 aa, Homo Sapiens
LSFQEVREY

SEQ ID NO: 158922 - protein, 9 aa, Homo Sapiens
LSFTHPISF

SEQ ID NO: 158923 - protein, 9 aa, Homo Sapiens
LSHSLLVTL

SEQ ID NO: 158924 - protein, 9 aa, Homo Sapiens
LSIPRVFYV

SEQ ID NO: 158925 - protein, 9 aa, Homo Sapiens
LSIPYRLIF

SEQ ID NO: 158926 - protein, 9 aa, Homo Sapiens
LSKDGVLYV

SEQ ID NO: 158927 - protein, 9 aa, Homo Sapiens
LSKDSILSL

SEQ ID NO: 158928 - protein, 9 aa, Homo Sapiens
LSKGPGLEV

SEQ ID NO: 158929 - protein, 9 aa, Homo Sapiens
LSPDFTFTA

SEQ ID NO: 158930 - protein, 9 aa, Homo Sapiens
LSSNVILHV

SEQ ID NO: 158931 - protein, 9 aa, Homo Sapiens
LSSPWYHTY

SEQ ID NO: 158932 - protein, 9 aa, Homo Sapiens
LSSSVIREL

SEQ ID NO: 158933 - protein, 9 aa, Homo Sapiens
LSTHLLILY

SEQ ID NO: 158934 - protein, 9 aa, Homo Sapiens
LSVDLIKTY

SEQ ID NO: 158935 - protein, 9 aa, Homo Sapiens
LSVEIVHEL

SEQ ID NO: 158936 - protein, 9 aa, Homo Sapiens
LSVPIIIKY

SEQ ID NO: 158937 - protein, 9 aa, Homo Sapiens
LSVYLVRQL

SEQ ID NO: 158938 - protein, 9 aa, Homo Sapiens
LSYTEILKI

SEQ ID NO: 158939 - protein, 9 aa, Homo Sapiens
LSYWKPFLV

SEQ ID NO: 158940 - protein, 9 aa, Homo Sapiens
LTFAGVKMY

SEQ ID NO: 158941 - protein, 9 aa, Homo Sapiens
LTFPHPVYY

SEQ ID NO: 158942 - protein, 9 aa, Homo Sapiens
LTIDHVPIW

SEQ ID NO: 158943 - protein, 9 aa, Homo Sapiens
LTINTAIVY

SEQ ID NO: 158944 - protein, 9 aa, Homo Sapiens
LTPSHIKAY

SEQ ID NO: 158945 - protein, 9 aa, Homo Sapiens
LTVPFARYL

SEQ ID NO: 158946 - protein, 9 aa, Homo Sapiens
LTVPWLVEF

SEQ ID NO: 158947 - protein, 9 aa, Homo Sapiens
LTYENVERW

SEQ ID NO: 158948 - protein, 9 aa, Homo Sapiens
LTYPRAVVF

SEQ ID NO: 158949 - protein, 9 aa, Homo Sapiens
LVIDAVREI

SEQ ID NO: 158950 - protein, 9 aa, Homo Sapiens
LVSQYFQTV

SEQ ID NO: 158951 - protein, 9 aa, Homo Sapiens
LVYDGIRDI

SEQ ID NO: 158952 - protein, 9 aa, Homo Sapiens
MAAAWPLLL

SEQ ID NO: 158953 - protein, 9 aa, Homo Sapiens
MAAERVKAW

SEQ ID NO: 158954 - protein, 9 aa, Homo Sapiens
MAAGLNSIL

SEQ ID NO: 158955 - protein, 9 aa, Homo Sapiens
MAANVIPVL

SEQ ID NO: 158956 - protein, 9 aa, Homo Sapiens
MAAPKVRFM

SEQ ID NO: 158957 - protein, 9 aa, Homo Sapiens
MAAPLVLVL

SEQ ID NO: 158958 - protein, 9 aa, Homo Sapiens
MAAPQIRKM

SEQ ID NO: 158959 - protein, 9 aa, Homo Sapiens
MAAPSWKCL

SEQ ID NO: 158960 - protein, 9 aa, Homo Sapiens
MAARIIAKL

SEQ ID NO: 158961 - protein, 9 aa, Homo Sapiens
MAFDPTSTL

SEQ ID NO: 158962 - protein, 9 aa, Homo Sapiens
MAFLLPLII

SEQ ID NO: 158963 - protein, 9 aa, Homo Sapiens
MAFPKPFES

SEQ ID NO: 158964 - protein, 9 aa, Homo Sapiens
MAFYVVKMY

SEQ ID NO: 158965 - protein, 9 aa, Homo Sapiens
MAGPLRAPL

SEQ ID NO: 158966 - protein, 9 aa, Homo Sapiens
MAHTGVIFF

SEQ ID NO: 158967 - protein, 9 aa, Homo Sapiens
MAINSISKL

SEQ ID NO: 158968 - protein, 9 aa, Homo Sapiens
MAIPLVFQI

SEQ ID NO: 158969 - protein, 9 aa, Homo Sapiens
MALAVRVVY

SEQ ID NO: 158970 - protein, 9 aa, Homo Sapiens
MALEHLVVW

SEQ ID NO: 158971 - protein, 9 aa, Homo Sapiens
MALGHVIVL

SEQ ID NO: 158972 - protein, 9 aa, Homo Sapiens
MANGEIHIY

SEQ ID NO: 158973 - protein, 9 aa, Homo Sapiens
MANPRELRI

SEQ ID NO: 158974 - protein, 9 aa, Homo Sapiens
MAPLKMLAL

SEQ ID NO: 158975 - protein, 9 aa, Homo Sapiens
MAQNIFAVL

SEQ ID NO: 158976 - protein, 9 aa, Homo Sapiens
MAQRLVRVL

SEQ ID NO: 158977 - protein, 9 aa, Homo Sapiens
MARETWEVL

SEQ ID NO: 158978 - protein, 9 aa, Homo Sapiens
MASKILKSY

SEQ ID NO: 158979 - protein, 9 aa, Homo Sapiens
MATPLLMQA

SEQ ID NO: 158980 - protein, 9 aa, Homo Sapiens
MAVAFVLSL

SEQ ID NO: 158981 - protein, 9 aa, Homo Sapiens
MAVEFLHEL

SEQ ID NO: 158982 - protein, 9 aa, Homo Sapiens
MAVEFPLVL

SEQ ID NO: 158983 - protein, 9 aa, Homo Sapiens
MAVPATVIY

SEQ ID NO: 158984 - protein, 9 aa, Homo Sapiens
MAVYLVKQL

SEQ ID NO: 158985 - protein, 9 aa, Homo Sapiens
MAWDLPSVL

SEQ ID NO: 158986 - protein, 9 aa, Homo Sapiens
MAYAGARFV

SEQ ID NO: 158987 - protein, 9 aa, Homo Sapiens
MAYARQIYI

SEQ ID NO: 158988 - protein, 9 aa, Homo Sapiens
MAYLKIQKY

SEQ ID NO: 158989 - protein, 9 aa, Homo Sapiens
MAYLYPLQW

SEQ ID NO: 158990 - protein, 9 aa, Homo Sapiens
MAYPDLNEI

SEQ ID NO: 158991 - protein, 9 aa, Homo Sapiens
MAYPSLVAM

SEQ ID NO: 158992 - protein, 9 aa, Homo Sapiens
MAYSNLLRA

SEQ ID NO: 158993 - protein, 9 aa, Homo Sapiens
MAYWKSVIL

SEQ ID NO: 158994 - protein, 9 aa, Homo Sapiens
MGFSGIVVH

SEQ ID NO: 158995 - protein, 9 aa, Homo Sapiens
MLFGHPLLV

SEQ ID NO: 158996 - protein, 9 aa, Homo Sapiens
MQFSKPRKL

SEQ ID NO: 158997 - protein, 9 aa, Homo Sapiens
MQISFIHQL

SEQ ID NO: 158998 - protein, 9 aa, Homo Sapiens
MSADVPLVV

SEQ ID NO: 158999 - protein, 9 aa, Homo Sapiens
MSCEVLRVL

SEQ ID NO: 159000 - protein, 9 aa, Homo Sapiens
MSFENQVKY

SEQ ID NO: 159001 - protein, 9 aa, Homo Sapiens
MSFGNVVEL

SEQ ID NO: 159002 - protein, 9 aa, Homo Sapiens
MSIPFRSAY

SEQ ID NO: 159003 - protein, 9 aa, Homo Sapiens
MSLHFLILY

SEQ ID NO: 159004 - protein, 9 aa, Homo Sapiens
MSVEVRQTL

SEQ ID NO: 159005 - protein, 9 aa, Homo Sapiens
MSVTKVVVH

SEQ ID NO: 159006 - protein, 9 aa, Homo Sapiens
MSVYLVRQL

SEQ ID NO: 159007 - protein, 9 aa, Homo Sapiens
MSYAEVMRL

SEQ ID NO: 159008 - protein, 9 aa, Homo Sapiens
MSYEQLMQL

SEQ ID NO: 159009 - protein, 9 aa, Homo Sapiens
MSYPAKVTL

SEQ ID NO: 159010 - protein, 9 aa, Homo Sapiens
MTFPGERIY

SEQ ID NO: 159011 - protein, 9 aa, Homo Sapiens
MTKDFEPIL

SEQ ID NO: 159012 - protein, 9 aa, Homo Sapiens
MTPEIIQKL

SEQ ID NO: 159013 - protein, 9 aa, Homo Sapiens
MTSNIVQCL

SEQ ID NO: 159014 - protein, 9 aa, Homo Sapiens
MTTEILRSM

SEQ ID NO: 159015 - protein, 9 aa, Homo Sapiens
MTYERILYI

SEQ ID NO: 159016 - protein, 9 aa, Homo Sapiens
MVFPKPVTA

SEQ ID NO: 159017 - protein, 9 aa, Homo Sapiens
MVVDIVQEL

SEQ ID NO: 159018 - protein, 9 aa, Homo Sapiens
MVYGGVRIV

SEQ ID NO: 159019 - protein, 9 aa, Homo Sapiens
NAAFALKQY

SEQ ID NO: 159020 - protein, 9 aa, Homo Sapiens
NAAKILPIM

SEQ ID NO: 159021 - protein, 9 aa, Homo Sapiens
NAAKVHLMV

SEQ ID NO: 159022 - protein, 9 aa, Homo Sapiens
NAARWPWVL

SEQ ID NO: 159023 - protein, 9 aa, Homo Sapiens
NAATILVFF

SEQ ID NO: 159024 - protein, 9 aa, Homo Sapiens
NAAVTVLRV

SEQ ID NO: 159025 - protein, 9 aa, Homo Sapiens
NAFAGLLKL

SEQ ID NO: 159026 - protein, 9 aa, Homo Sapiens
NAFASVILF

SEQ ID NO: 159027 - protein, 9 aa, Homo Sapiens
NAFEAPLTF

SEQ ID NO: 159028 - protein, 9 aa, Homo Sapiens
NAFEELVAF

SEQ ID NO: 159029 - protein, 9 aa, Homo Sapiens
NAFKEITTM

SEQ ID NO: 159030 - protein, 9 aa, Homo Sapiens
NAFLLPIKT

SEQ ID NO: 159031 - protein, 9 aa, Homo Sapiens
NAFMKAVEL

SEQ ID NO: 159032 - protein, 9 aa, Homo Sapiens
NAFNNSIIP

SEQ ID NO: 159033 - protein, 9 aa, Homo Sapiens
NAFPEIFYT

SEQ ID NO: 159034 - protein, 9 aa, Homo Sapiens
NAFQWAIKA

SEQ ID NO: 159035 - protein, 9 aa, Homo Sapiens
NAFRIIKEV

SEQ ID NO: 159036 - protein, 9 aa, Homo Sapiens
NAFSFPSEI

SEQ ID NO: 159037 - protein, 9 aa, Homo Sapiens
NAFSGVMML

SEQ ID NO: 159038 - protein, 9 aa, Homo Sapiens
NAFTMPLHM

SEQ ID NO: 159039 - protein, 9 aa, Homo Sapiens
NAFWKCVQA

SEQ ID NO: 159040 - protein, 9 aa, Homo Sapiens
NAIEDTIFY

SEQ ID NO: 159041 - protein, 9 aa, Homo Sapiens
NAIEHVIIP

SEQ ID NO: 159042 - protein, 9 aa, Homo Sapiens
NAIEKVFKV

SEQ ID NO: 159043 - protein, 9 aa, Homo Sapiens
NAIETMPCV

SEQ ID NO: 159044 - protein, 9 aa, Homo Sapiens
NAIGVLIYM

SEQ ID NO: 159045 - protein, 9 aa, Homo Sapiens
NAKDFFRVL

SEQ ID NO: 159046 - protein, 9 aa, Homo Sapiens
NALDKVLSV

SEQ ID NO: 159047 - protein, 9 aa, Homo Sapiens
NAMDVVVQF

SEQ ID NO: 159048 - protein, 9 aa, Homo Sapiens
NAMGKQWHV

SEQ ID NO: 159049 - protein, 9 aa, Homo Sapiens
NAMGYVRMI

SEQ ID NO: 159050 - protein, 9 aa, Homo Sapiens
NAMPHIKTY

SEQ ID NO: 159051 - protein, 9 aa, Homo Sapiens
NASPINRIV

SEQ ID NO: 159052 - protein, 9 aa, Homo Sapiens
NASPVISSV

SEQ ID NO: 159053 - protein, 9 aa, Homo Sapiens
NAVGVPIKV

SEQ ID NO: 159054 - protein, 9 aa, Homo Sapiens
NAVHWQPVF

SEQ ID NO: 159055 - protein, 9 aa, Homo Sapiens
NAVNLAIKY

SEQ ID NO: 159056 - protein, 9 aa, Homo Sapiens
NAYAFLTLY

SEQ ID NO: 159057 - protein, 9 aa, Homo Sapiens
NAYEFIMKL

SEQ ID NO: 159058 - protein, 9 aa, Homo Sapiens
NAYPSPLGY

SEQ ID NO: 159059 - protein, 9 aa, Homo Sapiens
NAYPSPQLL

SEQ ID NO: 159060 - protein, 9 aa, Homo Sapiens
NAYPYCRTI

SEQ ID NO: 159061 - protein, 9 aa, Homo Sapiens
NAYQRAILL

SEQ ID NO: 159062 - protein, 9 aa, Homo Sapiens
NAYTGIVLL

SEQ ID NO: 159063 - protein, 9 aa, Homo Sapiens
NFFPGVFEY

SEQ ID NO: 159064 - protein, 9 aa, Homo Sapiens
NIFSEVRVY

SEQ ID NO: 159065 - protein, 9 aa, Homo Sapiens
NIICGITSV

SEQ ID NO: 159066 - protein, 9 aa, Homo Sapiens
NIIDLVKKY

SEQ ID NO: 159067 - protein, 9 aa, Homo Sapiens
NIKAPKISM

SEQ ID NO: 159068 - protein, 9 aa, Homo Sapiens
NIPSFAPVL

SEQ ID NO: 159069 - protein, 9 aa, Homo Sapiens
NIRLRLEEY

SEQ ID NO: 159070 - protein, 9 aa, Homo Sapiens
NIYAANPVI

SEQ ID NO: 159071 - protein, 9 aa, Homo Sapiens
NMYGKVVTV

SEQ ID NO: 159072 - protein, 9 aa, Homo Sapiens
NMYIFPVHW

SEQ ID NO: 159073 - protein, 9 aa, Homo Sapiens
NNPQFVWVV

SEQ ID NO: 159074 - protein, 9 aa, Homo Sapiens
NQIPFIIQY

SEQ ID NO: 159075 - protein, 9 aa, Homo Sapiens
NSFGFPQYV

SEQ ID NO: 159076 - protein, 9 aa, Homo Sapiens
NSFGQRVYF

SEQ ID NO: 159077 - protein, 9 aa, Homo Sapiens
NSFIHVIMY

SEQ ID NO: 159078 - protein, 9 aa, Homo Sapiens
NSFPQKISY

SEQ ID NO: 159079 - protein, 9 aa, Homo Sapiens
NSFPQVILL

SEQ ID NO: 159080 - protein, 9 aa, Homo Sapiens
NSIGIIRCY

SEQ ID NO: 159081 - protein, 9 aa, Homo Sapiens
NSSPVINHL

SEQ ID NO: 159082 - protein, 9 aa, Homo Sapiens
NSSSIIQVM

SEQ ID NO: 159083 - protein, 9 aa, Homo Sapiens
NSTYIMRVL

SEQ ID NO: 159084 - protein, 9 aa, Homo Sapiens
NSYPHQLYT

SEQ ID NO: 159085 - protein, 9 aa, Homo Sapiens
NTINLIHTF

SEQ ID NO: 159086 - protein, 9 aa, Homo Sapiens
NTIPFIIRY

SEQ ID NO: 159087 - protein, 9 aa, Homo Sapiens
NTIPLAVVL

SEQ ID NO: 159088 - protein, 9 aa, Homo Sapiens
NTKEPPLSL

SEQ ID NO: 159089 - protein, 9 aa, Homo Sapiens
NTMHLLIKY

SEQ ID NO: 159090 - protein, 9 aa, Homo Sapiens
NTSEIILIL

SEQ ID NO: 159091 - protein, 9 aa, Homo Sapiens
NVKEMWTEV

SEQ ID NO: 159092 - protein, 9 aa, Homo Sapiens
NVPVFWPIL

SEQ ID NO: 159093 - protein, 9 aa, Homo Sapiens
NVYPEEMIV

SEQ ID NO: 159094 - protein, 9 aa, Homo Sapiens
PHFSFSTLP

SEQ ID NO: 159095 - protein, 9 aa, Homo Sapiens
PIRLLAAAA

SEQ ID NO: 159096 - protein, 9 aa, Homo Sapiens
PSIVHRKCF

SEQ ID NO: 159097 - protein, 9 aa, Homo Sapiens
QAADFALKV

SEQ ID NO: 159098 - protein, 9 aa, Homo Sapiens
QAADSILVL

SEQ ID NO: 159099 - protein, 9 aa, Homo Sapiens
QAADTVVIF

SEQ ID NO: 159100 - protein, 9 aa, Homo Sapiens
QAAGILLRL

SEQ ID NO: 159101 - protein, 9 aa, Homo Sapiens
QACGITAVL

SEQ ID NO: 159102 - protein, 9 aa, Homo Sapiens
QAFGGLLVA

SEQ ID NO: 159103 - protein, 9 aa, Homo Sapiens
QAFHEQIVI

SEQ ID NO: 159104 - protein, 9 aa, Homo Sapiens
QAFLEAVQF

SEQ ID NO: 159105 - protein, 9 aa, Homo Sapiens
QAFLIAIVV

SEQ ID NO: 159106 - protein, 9 aa, Homo Sapiens
QAFPGLLQL

SEQ ID NO: 159107 - protein, 9 aa, Homo Sapiens
QAFPLIIKL

SEQ ID NO: 159108 - protein, 9 aa, Homo Sapiens
QAFSRVQIY

SEQ ID NO: 159109 - protein, 9 aa, Homo Sapiens
QAGPINREM

SEQ ID NO: 159110 - protein, 9 aa, Homo Sapiens
QAIAIPVTV

SEQ ID NO: 159111 - protein, 9 aa, Homo Sapiens
QAIENAHVL

SEQ ID NO: 159112 - protein, 9 aa, Homo Sapiens
QAIERYLVV

SEQ ID NO: 159113 - protein, 9 aa, Homo Sapiens
QAIGAIRTL

SEQ ID NO: 159114 - protein, 9 aa, Homo Sapiens
QAINNAITY

SEQ ID NO: 159115 - protein, 9 aa, Homo Sapiens
QAIQWILHY

SEQ ID NO: 159116 - protein, 9 aa, Homo Sapiens
QAITLVTQY

SEQ ID NO: 159117 - protein, 9 aa, Homo Sapiens
QALPQVRLY

SEQ ID NO: 159118 - protein, 9 aa, Homo Sapiens
QALPWVRYI

SEQ ID NO: 159119 - protein, 9 aa, Homo Sapiens
QAMGSFLSV

SEQ ID NO: 159120 - protein, 9 aa, Homo Sapiens
QASEEILKV

SEQ ID NO: 159121 - protein, 9 aa, Homo Sapiens
QASPFVLRA

SEQ ID NO: 159122 - protein, 9 aa, Homo Sapiens
QASPLQILV

SEQ ID NO: 159123 - protein, 9 aa, Homo Sapiens
QATELVHQL

SEQ ID NO: 159124 - protein, 9 aa, Homo Sapiens
QATPLLHAL

SEQ ID NO: 159125 - protein, 9 aa, Homo Sapiens
QAVAIFTVY

SEQ ID NO: 159126 - protein, 9 aa, Homo Sapiens
QAVDYIKKL

SEQ ID NO: 159127 - protein, 9 aa, Homo Sapiens
QAVGAVLSL

SEQ ID NO: 159128 - protein, 9 aa, Homo Sapiens
QAVGIILHY

SEQ ID NO: 159129 - protein, 9 aa, Homo Sapiens
QAVNFPFLV

SEQ ID NO: 159130 - protein, 9 aa, Homo Sapiens
QAVQIINYI

SEQ ID NO: 159131 - protein, 9 aa, Homo Sapiens
QAYPEVRIV

SEQ ID NO: 159132 - protein, 9 aa, Homo Sapiens
QAYPTTVVF

SEQ ID NO: 159133 - protein, 9 aa, Homo Sapiens
QAYQEAFEI

SEQ ID NO: 159134 - protein, 9 aa, Homo Sapiens
QAYSGIQQY

SEQ ID NO: 159135 - protein, 9 aa, Homo Sapiens
QGFPNRVVF

SEQ ID NO: 159136 - protein, 9 aa, Homo Sapiens
QLLPFLVRY

SEQ ID NO: 159137 - protein, 9 aa, Homo Sapiens
QLPNFAFSV

SEQ ID NO: 159138 - protein, 9 aa, Homo Sapiens
QMFQGIILF

SEQ ID NO: 159139 - protein, 9 aa, Homo Sapiens
QMSNITVTY

SEQ ID NO: 159140 - protein, 9 aa, Homo Sapiens
QSFNAVVNY

SEQ ID NO: 159141 - protein, 9 aa, Homo Sapiens
QSFPEPLII

SEQ ID NO: 159142 - protein, 9 aa, Homo Sapiens
QSFPGILKA

SEQ ID NO: 159143 - protein, 9 aa, Homo Sapiens
QSSELTKWY

SEQ ID NO: 159144 - protein, 9 aa, Homo Sapiens
QSSGLVRHW

SEQ ID NO: 159145 - protein, 9 aa, Homo Sapiens
QSTDIIRYL

SEQ ID NO: 159146 - protein, 9 aa, Homo Sapiens
QSVSMVILY

SEQ ID NO: 159147 - protein, 9 aa, Homo Sapiens
QSYGNVVEL

SEQ ID NO: 159148 - protein, 9 aa, Homo Sapiens
QSYPTPVTV

SEQ ID NO: 159149 - protein, 9 aa, Homo Sapiens
QTFIRAIFY

SEQ ID NO: 159150 - protein, 9 aa, Homo Sapiens
QTIDNIVFY

SEQ ID NO: 159151 - protein, 9 aa, Homo Sapiens
QTYFFPIHL

SEQ ID NO: 159152 - protein, 9 aa, Homo Sapiens
QTYGYEHIL

SEQ ID NO: 159153 - protein, 9 aa, Homo Sapiens
QTYPEVVRM

SEQ ID NO: 159154 - protein, 9 aa, Homo Sapiens
RAADVLVYL

SEQ ID NO: 159155 - protein, 9 aa, Homo Sapiens
RAAEFIKNY

SEQ ID NO: 159156 - protein, 9 aa, Homo Sapiens
RAALPLQLL

SEQ ID NO: 159157 - protein, 9 aa, Homo Sapiens
RAAPFSLEY

SEQ ID NO: 159158 - protein, 9 aa, Homo Sapiens
RAASFVSVL

SEQ ID NO: 159159 - protein, 9 aa, Homo Sapiens
RAATFPLQV

SEQ ID NO: 159160 - protein, 9 aa, Homo Sapiens
RAFCGILYM

SEQ ID NO: 159161 - protein, 9 aa, Homo Sapiens
RAFDHVLHL

SEQ ID NO: 159162 - protein, 9 aa, Homo Sapiens
RAFEYEIRF

SEQ ID NO: 159163 - protein, 9 aa, Homo Sapiens
RAFGIPIRV

SEQ ID NO: 159164 - protein, 9 aa, Homo Sapiens
RAFHGWNEF

SEQ ID NO: 159165 - protein, 9 aa, Homo Sapiens
RAFKKPVFY

SEQ ID NO: 159166 - protein, 9 aa, Homo Sapiens
RAFNRIYVA

SEQ ID NO: 159167 - protein, 9 aa, Homo Sapiens
RAFPGLRYV

SEQ ID NO: 159168 - protein, 9 aa, Homo Sapiens
RAFPLPMSF

SEQ ID NO: 159169 - protein, 9 aa, Homo Sapiens
RAFPYGNVA

SEQ ID NO: 159170 - protein, 9 aa, Homo Sapiens
RAIAKIKML

SEQ ID NO: 159171 - protein, 9 aa, Homo Sapiens
RAIDFSPYL

SEQ ID NO: 159172 - protein, 9 aa, Homo Sapiens
RAIDKCWKI

SEQ ID NO: 159173 - protein, 9 aa, Homo Sapiens
RAIDSIHQL

SEQ ID NO: 159174 - protein, 9 aa, Homo Sapiens
RAIELATTL

SEQ ID NO: 159175 - protein, 9 aa, Homo Sapiens
RAIELFHSY

SEQ ID NO: 159176 - protein, 9 aa, Homo Sapiens
RAIENIDTL

SEQ ID NO: 159177 - protein, 9 aa, Homo Sapiens
RAILRIIYF

SEQ ID NO: 159178 - protein, 9 aa, Homo Sapiens
RAIQFYLEF

SEQ ID NO: 159179 - protein, 9 aa, Homo Sapiens
RALNFAYTV

SEQ ID NO: 159180 - protein, 9 aa, Homo Sapiens
RASFIFISV

SEQ ID NO: 159181 - protein, 9 aa, Homo Sapiens
RASGIFLRL

SEQ ID NO: 159182 - protein, 9 aa, Homo Sapiens
RASLLLKTY

SEQ ID NO: 159183 - protein, 9 aa, Homo Sapiens
RASNITMIL

SEQ ID NO: 159184 - protein, 9 aa, Homo Sapiens
RASPIKMDL

SEQ ID NO: 159185 - protein, 9 aa, Homo Sapiens
RASWIAQVF

SEQ ID NO: 159186 - protein, 9 aa, Homo Sapiens
RATALDNVV

SEQ ID NO: 159187 - protein, 9 aa, Homo Sapiens
RAVELVKSW

SEQ ID NO: 159188 - protein, 9 aa, Homo Sapiens
RAWFPPAIM

SEQ ID NO: 159189 - protein, 9 aa, Homo Sapiens
RAWGHPCEM

SEQ ID NO: 159190 - protein, 9 aa, Homo Sapiens
RAYAKALHY

SEQ ID NO: 159191 - protein, 9 aa, Homo Sapiens
RAYAKDVKF

SEQ ID NO: 159192 - protein, 9 aa, Homo Sapiens
RAYALCVLY

SEQ ID NO: 159193 - protein, 9 aa, Homo Sapiens
RAYDGTTYL

SEQ ID NO: 159194 - protein, 9 aa, Homo Sapiens
RAYELTQYY

SEQ ID NO: 159195 - protein, 9 aa, Homo Sapiens
RAYIFAMKV

SEQ ID NO: 159196 - protein, 9 aa, Homo Sapiens
RAYPAAITI

SEQ ID NO: 159197 - protein, 9 aa, Homo Sapiens
RAYPAQITP

SEQ ID NO: 159198 - protein, 9 aa, Homo Sapiens
RAYPHVFTK

SEQ ID NO: 159199 - protein, 9 aa, Homo Sapiens
RAYPSMMGL

SEQ ID NO: 159200 - protein, 9 aa, Homo Sapiens
RAYPTVKFY

SEQ ID NO: 159201 - protein, 9 aa, Homo Sapiens
RAYQRQLVM

SEQ ID NO: 159202 - protein, 9 aa, Homo Sapiens
RAYSFKVVL

SEQ ID NO: 159203 - protein, 9 aa, Homo Sapiens
RFFEAIVWY

SEQ ID NO: 159204 - protein, 9 aa, Homo Sapiens
RGFDKAYVV

SEQ ID NO: 159205 - protein, 9 aa, Homo Sapiens
RGYDFCQVL

SEQ ID NO: 159206 - protein, 9 aa, Homo Sapiens
RIIDCAFTV

SEQ ID NO: 159207 - protein, 9 aa, Homo Sapiens
RIYPFLLMV

SEQ ID NO: 159208 - protein, 9 aa, Homo Sapiens
RLFGAVVRW

SEQ ID NO: 159209 - protein, 9 aa, Homo Sapiens
RLGPPEPMM

SEQ ID NO: 159210 - protein, 9 aa, Homo Sapiens
RLPAWQPIL

SEQ ID NO: 159211 - protein, 9 aa, Homo Sapiens
RLPEFIVQT

SEQ ID NO: 159212 - protein, 9 aa, Homo Sapiens
RLPVFNWTA

SEQ ID NO: 159213 - protein, 9 aa, Homo Sapiens
RMYPGLQVY

SEQ ID NO: 159214 - protein, 9 aa, Homo Sapiens
RQADCILIV

SEQ ID NO: 159215 - protein, 9 aa, Homo Sapiens
RQADFVQVL

SEQ ID NO: 159216 - protein, 9 aa, Homo Sapiens
RQFDHPHIV

SEQ ID NO: 159217 - protein, 9 aa, Homo Sapiens
RQFPVTVHF

SEQ ID NO: 159218 - protein, 9 aa, Homo Sapiens
RQIDFVLSY

SEQ ID NO: 159219 - protein, 9 aa, Homo Sapiens
RQIGVEHVV

SEQ ID NO: 159220 - protein, 9 aa, Homo Sapiens
RQINWTVLY

SEQ ID NO: 159221 - protein, 9 aa, Homo Sapiens
RQYPEVIKY

SEQ ID NO: 159222 - protein, 9 aa, Homo Sapiens
RSAEVTLEV

SEQ ID NO: 159223 - protein, 9 aa, Homo Sapiens
RSFEAEINY

SEQ ID NO: 159224 - protein, 9 aa, Homo Sapiens
RSFPSVREL

SEQ ID NO: 159225 - protein, 9 aa, Homo Sapiens
RSIDLTVKL

SEQ ID NO: 159226 - protein, 9 aa, Homo Sapiens
RSLEFSVSY

SEQ ID NO: 159227 - protein, 9 aa, Homo Sapiens
RSLHFFVEW

SEQ ID NO: 159228 - protein, 9 aa, Homo Sapiens
RSSENILTV

SEQ ID NO: 159229 - protein, 9 aa, Homo Sapiens
RSTDSIRLL

SEQ ID NO: 159230 - protein, 9 aa, Homo Sapiens
RSVDIINML

SEQ ID NO: 159231 - protein, 9 aa, Homo Sapiens
RSYPYAFSV

SEQ ID NO: 159232 - protein, 9 aa, Homo Sapiens
RTADVIIMM

SEQ ID NO: 159233 - protein, 9 aa, Homo Sapiens
RTAGIFSLI

SEQ ID NO: 159234 - protein, 9 aa, Homo Sapiens
RTFPWIIEV

SEQ ID NO: 159235 - protein, 9 aa, Homo Sapiens
RTIAKRLVL

SEQ ID NO: 159236 - protein, 9 aa, Homo Sapiens
RTIDFVHQV

SEQ ID NO: 159237 - protein, 9 aa, Homo Sapiens
RTKDTPLSL

SEQ ID NO: 159238 - protein, 9 aa, Homo Sapiens
RTTDIVIRI

SEQ ID NO: 159239 - protein, 9 aa, Homo Sapiens
RTVDLFPVL

SEQ ID NO: 159240 - protein, 9 aa, Homo Sapiens
RTYDLYITY

SEQ ID NO: 159241 - protein, 9 aa, Homo Sapiens
RTYDMIQYY

SEQ ID NO: 159242 - protein, 9 aa, Homo Sapiens
RTYPSIQIM

SEQ ID NO: 159243 - protein, 9 aa, Homo Sapiens
RTYPVEILY

SEQ ID NO: 159244 - protein, 9 aa, Homo Sapiens
RVFPHEVNW

SEQ ID NO: 159245 - protein, 9 aa, Homo Sapiens
RVFPSPMRI

SEQ ID NO: 159246 - protein, 9 aa, Homo Sapiens
RVFPYISVM

SEQ ID NO: 159247 - protein, 9 aa, Homo Sapiens
RVFPYSVFY

SEQ ID NO: 159248 - protein, 9 aa, Homo Sapiens
RVIELAVKY

SEQ ID NO: 159249 - protein, 9 aa, Homo Sapiens
RVKKTWTVV

SEQ ID NO: 159250 - protein, 9 aa, Homo Sapiens
RVPNSVLWL

SEQ ID NO: 159251 - protein, 9 aa, Homo Sapiens
RVSELHLEV

SEQ ID NO: 159252 - protein, 9 aa, Homo Sapiens
RVYERLLYV

SEQ ID NO: 159253 - protein, 9 aa, Homo Sapiens
RVYPQAVYF

SEQ ID NO: 159254 - protein, 9 aa, Homo Sapiens
RWYNHIKSY

SEQ ID NO: 159255 - protein, 9 aa, Homo Sapiens
SAAAAPHLL

SEQ ID NO: 159256 - protein, 9 aa, Homo Sapiens
SAAAIFKIY

SEQ ID NO: 159257 - protein, 9 aa, Homo Sapiens
SAADIPINI

SEQ ID NO: 159258 - protein, 9 aa, Homo Sapiens
SAADLVHFL

SEQ ID NO: 159259 - protein, 9 aa, Homo Sapiens
SAADVVVVH

SEQ ID NO: 159260 - protein, 9 aa, Homo Sapiens
SAAEHFSII

SEQ ID NO: 159261 - protein, 9 aa, Homo Sapiens
SAAEHFSMI

SEQ ID NO: 159262 - protein, 9 aa, Homo Sapiens
SAAEIMAVL

SEQ ID NO: 159263 - protein, 9 aa, Homo Sapiens
SAAENFLVL

SEQ ID NO: 159264 - protein, 9 aa, Homo Sapiens
SAAFAVKLF

SEQ ID NO: 159265 - protein, 9 aa, Homo Sapiens
SAAFIFSYI

SEQ ID NO: 159266 - protein, 9 aa, Homo Sapiens
SAAFPGASL

SEQ ID NO: 159267 - protein, 9 aa, Homo Sapiens
SAAGFPIRV

SEQ ID NO: 159268 - protein, 9 aa, Homo Sapiens
SAAGLKLYL

SEQ ID NO: 159269 - protein, 9 aa, Homo Sapiens
SAAHAIVSV

SEQ ID NO: 159270 - protein, 9 aa, Homo Sapiens
SAAHFVMFF

SEQ ID NO: 159271 - protein, 9 aa, Homo Sapiens
SAAMVFSAL

SEQ ID NO: 159272 - protein, 9 aa, Homo Sapiens
SAANIQPIF

SEQ ID NO: 159273 - protein, 9 aa, Homo Sapiens
SAAPFAQRY

SEQ ID NO: 159274 - protein, 9 aa, Homo Sapiens
SAAPFFVLF

SEQ ID NO: 159275 - protein, 9 aa, Homo Sapiens
SAAPLPLYT

SEQ ID NO: 159276 - protein, 9 aa, Homo Sapiens
SAAPLQPVL

SEQ ID NO: 159277 - protein, 9 aa, Homo Sapiens
SAAPVAHLL

SEQ ID NO: 159278 - protein, 9 aa, Homo Sapiens
SAASICAKV

SEQ ID NO: 159279 - protein, 9 aa, Homo Sapiens
SAASLYPVL

SEQ ID NO: 159280 - protein, 9 aa, Homo Sapiens
SAAYLPRMW

SEQ ID NO: 159281 - protein, 9 aa, Homo Sapiens
SAFATPFLV

SEQ ID NO: 159282 - protein, 9 aa, Homo Sapiens
SAFAYAIAA

SEQ ID NO: 159283 - protein, 9 aa, Homo Sapiens
SAFDHFASV

SEQ ID NO: 159284 - protein, 9 aa, Homo Sapiens
SAFDRCATL

SEQ ID NO: 159285 - protein, 9 aa, Homo Sapiens
SAFDRKVQF

SEQ ID NO: 159286 - protein, 9 aa, Homo Sapiens
SAFDRVMRL

SEQ ID NO: 159287 - protein, 9 aa, Homo Sapiens
SAFEKPQII

SEQ ID NO: 159288 - protein, 9 aa, Homo Sapiens
SAFGLPIVF

SEQ ID NO: 159289 - protein, 9 aa, Homo Sapiens
SAFGNVKLV

SEQ ID NO: 159290 - protein, 9 aa, Homo Sapiens
SAFGQIYKV

SEQ ID NO: 159291 - protein, 9 aa, Homo Sapiens
SAFGYFITA

SEQ ID NO: 159292 - protein, 9 aa, Homo Sapiens
SAFINLVEF

SEQ ID NO: 159293 - protein, 9 aa, Homo Sapiens
SAFLPARFY

SEQ ID NO: 159294 - protein, 9 aa, Homo Sapiens
SAFPEVRSL

SEQ ID NO: 159295 - protein, 9 aa, Homo Sapiens
SAFPFLQEY

SEQ ID NO: 159296 - protein, 9 aa, Homo Sapiens
SAFPFPVTV

SEQ ID NO: 159297 - protein, 9 aa, Homo Sapiens
SAFPHLRVL

SEQ ID NO: 159298 - protein, 9 aa, Homo Sapiens
SAFPSNIFY

SEQ ID NO: 159299 - protein, 9 aa, Homo Sapiens
SAFPYAHRF

SEQ ID NO: 159300 - protein, 9 aa, Homo Sapiens
SAFSRIMKL

SEQ ID NO: 159301 - protein, 9 aa, Homo Sapiens
SAFTNRIFF

SEQ ID NO: 159302 - protein, 9 aa, Homo Sapiens
SAFYFVMKF

SEQ ID NO: 159303 - protein, 9 aa, Homo Sapiens
SAGPLLRPY

SEQ ID NO: 159304 - protein, 9 aa, Homo Sapiens
SAHSKVVIF

SEQ ID NO: 159305 - protein, 9 aa, Homo Sapiens
SAIASTKVM

SEQ ID NO: 159306 - protein, 9 aa, Homo Sapiens
SAIDRIFTL

SEQ ID NO: 159307 - protein, 9 aa, Homo Sapiens
SAIFCVVIF

SEQ ID NO: 159308 - protein, 9 aa, Homo Sapiens
SAIGFALEL

SEQ ID NO: 159309 - protein, 9 aa, Homo Sapiens
SAIGLVLLM

SEQ ID NO: 159310 - protein, 9 aa, Homo Sapiens
SAIGYIHSL

SEQ ID NO: 159311 - protein, 9 aa, Homo Sapiens
SAINWTLIH

SEQ ID NO: 159312 - protein, 9 aa, Homo Sapiens
SAIPHPLIM

SEQ ID NO: 159313 - protein, 9 aa, Homo Sapiens
SAIQKIITI

SEQ ID NO: 159314 - protein, 9 aa, Homo Sapiens
SAISSVRLY

SEQ ID NO: 159315 - protein, 9 aa, Homo Sapiens
SAITKPWEV

SEQ ID NO: 159316 - protein, 9 aa, Homo Sapiens
SAKDFIRNL

SEQ ID NO: 159317 - protein, 9 aa, Homo Sapiens
SAKPYAHIL

SEQ ID NO: 159318 - protein, 9 aa, Homo Sapiens
SAKTPGFSV

SEQ ID NO: 159319 - protein, 9 aa, Homo Sapiens
SALDMTRYW

SEQ ID NO: 159320 - protein, 9 aa, Homo Sapiens
SALEHSIQY

SEQ ID NO: 159321 - protein, 9 aa, Homo Sapiens
SALEHVVEF

SEQ ID NO: 159322 - protein, 9 aa, Homo Sapiens
SALEVVRKY

SEQ ID NO: 159323 - protein, 9 aa, Homo Sapiens
SALHIIVQY

SEQ ID NO: 159324 - protein, 9 aa, Homo Sapiens
SALPFITYL

SEQ ID NO: 159325 - protein, 9 aa, Homo Sapiens
SALPTVVAY

SEQ ID NO: 159326 - protein, 9 aa, Homo Sapiens
SAMPTVRSF

SEQ ID NO: 159327 - protein, 9 aa, Homo Sapiens
SAMVRVISV

SEQ ID NO: 159328 - protein, 9 aa, Homo Sapiens
SANHNILQI

SEQ ID NO: 159329 - protein, 9 aa, Homo Sapiens
SAQPLPLKI

SEQ ID NO: 159330 - protein, 9 aa, Homo Sapiens
SASDIFNVA

SEQ ID NO: 159331 - protein, 9 aa, Homo Sapiens
SASEVLKEW

SEQ ID NO: 159332 - protein, 9 aa, Homo Sapiens
SASFLPKYF

SEQ ID NO: 159333 - protein, 9 aa, Homo Sapiens
SASKIIVFV

SEQ ID NO: 159334 - protein, 9 aa, Homo Sapiens
SASPIFTHV

SEQ ID NO: 159335 - protein, 9 aa, Homo Sapiens
SASPWALTI

SEQ ID NO: 159336 - protein, 9 aa, Homo Sapiens
SASRVVQVV

SEQ ID NO: 159337 - protein, 9 aa, Homo Sapiens
SASTVVLQV

SEQ ID NO: 159338 - protein, 9 aa, Homo Sapiens
SASVYIKKV

SEQ ID NO: 159339 - protein, 9 aa, Homo Sapiens
SATELMNIL

SEQ ID NO: 159340 - protein, 9 aa, Homo Sapiens
SATRLIQRL

SEQ ID NO: 159341 - protein, 9 aa, Homo Sapiens
SATSLLHTV

SEQ ID NO: 159342 - protein, 9 aa, Homo Sapiens
SAVDFIRTL

SEQ ID NO: 159343 - protein, 9 aa, Homo Sapiens
SAVDKVIFV

SEQ ID NO: 159344 - protein, 9 aa, Homo Sapiens
SAVDVHINM

SEQ ID NO: 159345 - protein, 9 aa, Homo Sapiens
SAVELVQEF

SEQ ID NO: 159346 - protein, 9 aa, Homo Sapiens
SAVEVCVVY

SEQ ID NO: 159347 - protein, 9 aa, Homo Sapiens
SAVFNPSVL

SEQ ID NO: 159348 - protein, 9 aa, Homo Sapiens
SAVGHVFSL

SEQ ID NO: 159349 - protein, 9 aa, Homo Sapiens
SAVGLTAYV

SEQ ID NO: 159350 - protein, 9 aa, Homo Sapiens
SAVNIIRTF

SEQ ID NO: 159351 - protein, 9 aa, Homo Sapiens
SAVPFLILV

SEQ ID NO: 159352 - protein, 9 aa, Homo Sapiens
SAVPKVMKV

SEQ ID NO: 159353 - protein, 9 aa, Homo Sapiens
SAVRWLLEL

SEQ ID NO: 159354 - protein, 9 aa, Homo Sapiens
SAVSIFHEL

SEQ ID NO: 159355 - protein, 9 aa, Homo Sapiens
SAVSILIKP

SEQ ID NO: 159356 - protein, 9 aa, Homo Sapiens
SAVTFVLTY

SEQ ID NO: 159357 - protein, 9 aa, Homo Sapiens
SAVTRLLIL

SEQ ID NO: 159358 - protein, 9 aa, Homo Sapiens
SAWPSLRLY

SEQ ID NO: 159359 - protein, 9 aa, Homo Sapiens
SAWRVISSI

SEQ ID NO: 159360 - protein, 9 aa, Homo Sapiens
SAWSFITTF

SEQ ID NO: 159361 - protein, 9 aa, Homo Sapiens
SAYAGFLAL

SEQ ID NO: 159362 - protein, 9 aa, Homo Sapiens
SAYAQIVQF

SEQ ID NO: 159363 - protein, 9 aa, Homo Sapiens
SAYARLIDY

SEQ ID NO: 159364 - protein, 9 aa, Homo Sapiens
SAYEFVTWL

SEQ ID NO: 159365 - protein, 9 aa, Homo Sapiens
SAYESLMEI

SEQ ID NO: 159366 - protein, 9 aa, Homo Sapiens
SAYGSVKAY

SEQ ID NO: 159367 - protein, 9 aa, Homo Sapiens
SAYLHPQQF

SEQ ID NO: 159368 - protein, 9 aa, Homo Sapiens
SAYPLSVEW

SEQ ID NO: 159369 - protein, 9 aa, Homo Sapiens
SGFSGVIRL

SEQ ID NO: 159370 - protein, 9 aa, Homo Sapiens
SGSDIVKLY

SEQ ID NO: 159371 - protein, 9 aa, Homo Sapiens
SIAWFTVFY

SEQ ID NO: 159372 - protein, 9 aa, Homo Sapiens
SIFEHKIVF

SEQ ID NO: 159373 - protein, 9 aa, Homo Sapiens
SIIGRLLEV

SEQ ID NO: 159374 - protein, 9 aa, Homo Sapiens
SIITYVVTY

SEQ ID NO: 159375 - protein, 9 aa, Homo Sapiens
SIKDGVMVL

SEQ ID NO: 159376 - protein, 9 aa, Homo Sapiens
SIPAITRYW

SEQ ID NO: 159377 - protein, 9 aa, Homo Sapiens
SIPDFPMHL

SEQ ID NO: 159378 - protein, 9 aa, Homo Sapiens
SIPEFFHIM

SEQ ID NO: 159379 - protein, 9 aa, Homo Sapiens
SITRLIKKY

SEQ ID NO: 159380 - protein, 9 aa, Homo Sapiens
SIYTGVIIV

SEQ ID NO: 159381 - protein, 9 aa, Homo Sapiens
SLAPYVKVF

SEQ ID NO: 159382 - protein, 9 aa, Homo Sapiens
SLFPHAICL

SEQ ID NO: 159383 - protein, 9 aa, Homo Sapiens
SLFSVPVIY

SEQ ID NO: 159384 - protein, 9 aa, Homo Sapiens
SLYDRIVLF

SEQ ID NO: 159385 - protein, 9 aa, Homo Sapiens
SMFGGVMVF

SEQ ID NO: 159386 - protein, 9 aa, Homo Sapiens
SMFHNRHLF

SEQ ID NO: 159387 - protein, 9 aa, Homo Sapiens
SNFLHPVIY

SEQ ID NO: 159388 - protein, 9 aa, Homo Sapiens
SQANIAQVL

SEQ ID NO: 159389 - protein, 9 aa, Homo Sapiens
SQSGLVHIW

SEQ ID NO: 159390 - protein, 9 aa, Homo Sapiens
SQYPDIVIV

SEQ ID NO: 159391 - protein, 9 aa, Homo Sapiens
SQYPFPVTL

SEQ ID NO: 159392 - protein, 9 aa, Homo Sapiens
SQYQGVVVY

SEQ ID NO: 159393 - protein, 9 aa, Homo Sapiens
SQYSNVVIF

SEQ ID NO: 159394 - protein, 9 aa, Homo Sapiens
SSAPIFTVI

SEQ ID NO: 159395 - protein, 9 aa, Homo Sapiens
SSFPGISIM

SEQ ID NO: 159396 - protein, 9 aa, Homo Sapiens
SSFPGVTVI

SEQ ID NO: 159397 - protein, 9 aa, Homo Sapiens
SSFPLPKQY

SEQ ID NO: 159398 - protein, 9 aa, Homo Sapiens
SSFPTVVIY

SEQ ID NO: 159399 - protein, 9 aa, Homo Sapiens
SSFTKVITL

SEQ ID NO: 159400 - protein, 9 aa, Homo Sapiens
SSFTTIVTY

SEQ ID NO: 159401 - protein, 9 aa, Homo Sapiens
SSSAVFLII

SEQ ID NO: 159402 - protein, 9 aa, Homo Sapiens
SSTILVVRY

SEQ ID NO: 159403 - protein, 9 aa, Homo Sapiens
SSVEILRVY

SEQ ID NO: 159404 - protein, 9 aa, Homo Sapiens
SSVHVIMYL

SEQ ID NO: 159405 - protein, 9 aa, Homo Sapiens
SSVPGVRLL

SEQ ID NO: 159406 - protein, 9 aa, Homo Sapiens
SSYDKPITF

SEQ ID NO: 159407 - protein, 9 aa, Homo Sapiens
SSYLFIVKY

SEQ ID NO: 159408 - protein, 9 aa, Homo Sapiens
SSYYNVTYW

SEQ ID NO: 159409 - protein, 9 aa, Homo Sapiens
STCEFVRTL

SEQ ID NO: 159410 - protein, 9 aa, Homo Sapiens
STFSGIKEL

SEQ ID NO: 159411 - protein, 9 aa, Homo Sapiens
STIDKVSVL

SEQ ID NO: 159412 - protein, 9 aa, Homo Sapiens
STILHLVVM

SEQ ID NO: 159413 - protein, 9 aa, Homo Sapiens
STKPPGTFL

SEQ ID NO: 159414 - protein, 9 aa, Homo Sapiens
STVHFIIFV

SEQ ID NO: 159415 - protein, 9 aa, Homo Sapiens
STYPAPFYV

SEQ ID NO: 159416 - protein, 9 aa, Homo Sapiens
SVADLAHVL

SEQ ID NO: 159417 - protein, 9 aa, Homo Sapiens
SVEDIFSEV

SEQ ID NO: 159418 - protein, 9 aa, Homo Sapiens
SVFGGLVNY

SEQ ID NO: 159419 - protein, 9 aa, Homo Sapiens
SVFPGARLL

SEQ ID NO: 159420 - protein, 9 aa, Homo Sapiens
SVIDHIHLI

SEQ ID NO: 159421 - protein, 9 aa, Homo Sapiens
SVISHLLRV

SEQ ID NO: 159422 - protein, 9 aa, Homo Sapiens
SVKWPNSVM

SEQ ID NO: 159423 - protein, 9 aa, Homo Sapiens
SVLPFQIYY

SEQ ID NO: 159424 - protein, 9 aa, Homo Sapiens
SVVSFLLRV

SEQ ID NO: 159425 - protein, 9 aa, Homo Sapiens
SVYSRVIQV

SEQ ID NO: 159426 - protein, 9 aa, Homo Sapiens
SVYSWDIVV

SEQ ID NO: 159427 - protein, 9 aa, Homo Sapiens
TAADIFKQY

SEQ ID NO: 159428 - protein, 9 aa, Homo Sapiens
TAADLGSVV

SEQ ID NO: 159429 - protein, 9 aa, Homo Sapiens
TAADTVIIY

SEQ ID NO: 159430 - protein, 9 aa, Homo Sapiens
TAADVVKQW

SEQ ID NO: 159431 - protein, 9 aa, Homo Sapiens
TAAFWTRLY

SEQ ID NO: 159432 - protein, 9 aa, Homo Sapiens
TAAGIHPQI

SEQ ID NO: 159433 - protein, 9 aa, Homo Sapiens
TAAPTIGVL

SEQ ID NO: 159434 - protein, 9 aa, Homo Sapiens
TAAVHIILV

SEQ ID NO: 159435 - protein, 9 aa, Homo Sapiens
TAFETIILL

SEQ ID NO: 159436 - protein, 9 aa, Homo Sapiens
TAFGGFLKY

SEQ ID NO: 159437 - protein, 9 aa, Homo Sapiens
TAFPEASFL

SEQ ID NO: 159438 - protein, 9 aa, Homo Sapiens
TAFPFQVEV

SEQ ID NO: 159439 - protein, 9 aa, Homo Sapiens
TAFPKPLLT

SEQ ID NO: 159440 - protein, 9 aa, Homo Sapiens
TAFQRPQLM

SEQ ID NO: 159441 - protein, 9 aa, Homo Sapiens
TAFSRLILI

SEQ ID NO: 159442 - protein, 9 aa, Homo Sapiens
TAFVEPFVI

SEQ ID NO: 159443 - protein, 9 aa, Homo Sapiens
TAFVEPLVI

SEQ ID NO: 159444 - protein, 9 aa, Homo Sapiens
TAHPSPLSV

SEQ ID NO: 159445 - protein, 9 aa, Homo Sapiens
TAIELIPSV

SEQ ID NO: 159446 - protein, 9 aa, Homo Sapiens
TAIGHINRY

SEQ ID NO: 159447 - protein, 9 aa, Homo Sapiens
TAMKKVFRV

SEQ ID NO: 159448 - protein, 9 aa, Homo Sapiens
TAQTLVRIL

SEQ ID NO: 159449 - protein, 9 aa, Homo Sapiens
TASDKILIV

SEQ ID NO: 159450 - protein, 9 aa, Homo Sapiens
TASEMILVL

SEQ ID NO: 159451 - protein, 9 aa, Homo Sapiens
TASKVIVAV

SEQ ID NO: 159452 - protein, 9 aa, Homo Sapiens
TASPLVKSV

SEQ ID NO: 159453 - protein, 9 aa, Homo Sapiens
TASPVAVSL

SEQ ID NO: 159454 - protein, 9 aa, Homo Sapiens
TASPVIKAV

SEQ ID NO: 159455 - protein, 9 aa, Homo Sapiens
TATALAIIY

SEQ ID NO: 159456 - protein, 9 aa, Homo Sapiens
TATMHILVV

SEQ ID NO: 159457 - protein, 9 aa, Homo Sapiens
TATPITIRY

SEQ ID NO: 159458 - protein, 9 aa, Homo Sapiens
TAVALLRLL

SEQ ID NO: 159459 - protein, 9 aa, Homo Sapiens
TAVFLTGVL

SEQ ID NO: 159460 - protein, 9 aa, Homo Sapiens
TAVKIAPRY

SEQ ID NO: 159461 - protein, 9 aa, Homo Sapiens
TAVRWVVTL

SEQ ID NO: 159462 - protein, 9 aa, Homo Sapiens
TAVWLPRYY

SEQ ID NO: 159463 - protein, 9 aa, Homo Sapiens
TAYAYATVL

SEQ ID NO: 159464 - protein, 9 aa, Homo Sapiens
TAYIHQVTV

SEQ ID NO: 159465 - protein, 9 aa, Homo Sapiens
TAYNLVHEL

SEQ ID NO: 159466 - protein, 9 aa, Homo Sapiens
TAYPGQTQY

SEQ ID NO: 159467 - protein, 9 aa, Homo Sapiens
TAYPQVVVV

SEQ ID NO: 159468 - protein, 9 aa, Homo Sapiens
TAYPSLRLI

SEQ ID NO: 159469 - protein, 9 aa, Homo Sapiens
TAYTRQQVL

SEQ ID NO: 159470 - protein, 9 aa, Homo Sapiens
TAYYRLLIT

SEQ ID NO: 159471 - protein, 9 aa, Homo Sapiens
TGFPWAFKV

SEQ ID NO: 159472 - protein, 9 aa, Homo Sapiens
TGTHLVLTV

SEQ ID NO: 159473 - protein, 9 aa, Homo Sapiens
TGYSEVIVV

SEQ ID NO: 159474 - protein, 9 aa, Homo Sapiens
TIKHWITII

SEQ ID NO: 159475 - protein, 9 aa, Homo Sapiens
TINGKIAVL

SEQ ID NO: 159476 - protein, 9 aa, Homo Sapiens
TIYPGLMIT

SEQ ID NO: 159477 - protein, 9 aa, Homo Sapiens
TLVDFIIIH

SEQ ID NO: 159478 - protein, 9 aa, Homo Sapiens
TLVHFVVTW

SEQ ID NO: 159479 - protein, 9 aa, Homo Sapiens
TMFVQRQVF

SEQ ID NO: 159480 - protein, 9 aa, Homo Sapiens
TMYPFIVTL

SEQ ID NO: 159481 - protein, 9 aa, Homo Sapiens
TQPTHSWKV

SEQ ID NO: 159482 - protein, 9 aa, Homo Sapiens
TSAAIYHVL

SEQ ID NO: 159483 - protein, 9 aa, Homo Sapiens
TSFPSPMEI

SEQ ID NO: 159484 - protein, 9 aa, Homo Sapiens
TSFPSPVSV

SEQ ID NO: 159485 - protein, 9 aa, Homo Sapiens
TSIGWLRLL

SEQ ID NO: 159486 - protein, 9 aa, Homo Sapiens
TSSPINIVV

SEQ ID NO: 159487 - protein, 9 aa, Homo Sapiens
TSSPSILTL

SEQ ID NO: 159488 - protein, 9 aa, Homo Sapiens
TSYPDPILL

SEQ ID NO: 159489 - protein, 9 aa, Homo Sapiens
TTFPRPVTV

SEQ ID NO: 159490 - protein, 9 aa, Homo Sapiens
TTIDIGVKY

SEQ ID NO: 159491 - protein, 9 aa, Homo Sapiens
TTSWIHPVM

SEQ ID NO: 159492 - protein, 9 aa, Homo Sapiens
TTVKFVVKM

SEQ ID NO: 159493 - protein, 9 aa, Homo Sapiens
TTVPFGVTY

SEQ ID NO: 159494 - protein, 9 aa, Homo Sapiens
TTVPGVIRY

SEQ ID NO: 159495 - protein, 9 aa, Homo Sapiens
TVPTFVLSI

SEQ ID NO: 159496 - protein, 9 aa, Homo Sapiens
TVSGRILVV

SEQ ID NO: 159497 - protein, 9 aa, Homo Sapiens
TVTTVILEV

SEQ ID NO: 159498 - protein, 9 aa, Homo Sapiens
TVVNFLIRV

SEQ ID NO: 159499 - protein, 9 aa, Homo Sapiens
TVYGGLMYI

SEQ ID NO: 159500 - protein, 9 aa, Homo Sapiens
TVYPVAIKY

SEQ ID NO: 159501 - protein, 9 aa, Homo Sapiens
TWINHFVIW

SEQ ID NO: 159502 - protein, 9 aa, Homo Sapiens
TWINHLVTW

SEQ ID NO: 159503 - protein, 9 aa, Homo Sapiens
VAADILNRL

SEQ ID NO: 159504 - protein, 9 aa, Homo Sapiens
VAAEAFSEL

SEQ ID NO: 159505 - protein, 9 aa, Homo Sapiens
VAAHLVIIM

SEQ ID NO: 159506 - protein, 9 aa, Homo Sapiens
VAANRVIIF

SEQ ID NO: 159507 - protein, 9 aa, Homo Sapiens
VAAPFRCEF

SEQ ID NO: 159508 - protein, 9 aa, Homo Sapiens
VAAPQVQQV

SEQ ID NO: 159509 - protein, 9 aa, Homo Sapiens
VAASLIQKM

SEQ ID NO: 159510 - protein, 9 aa, Homo Sapiens
VAASNIVQM

SEQ ID NO: 159511 - protein, 9 aa, Homo Sapiens
VAATLLKQL

SEQ ID NO: 159512 - protein, 9 aa, Homo Sapiens
VAFDAVLRF

SEQ ID NO: 159513 - protein, 9 aa, Homo Sapiens
VAFDVEIHM

SEQ ID NO: 159514 - protein, 9 aa, Homo Sapiens
VAFEMCSQL

SEQ ID NO: 159515 - protein, 9 aa, Homo Sapiens
VAFHIPFEV

SEQ ID NO: 159516 - protein, 9 aa, Homo Sapiens
VAFHTQLFF

SEQ ID NO: 159517 - protein, 9 aa, Homo Sapiens
VAFNQPVKL

SEQ ID NO: 159518 - protein, 9 aa, Homo Sapiens
VAFNWIIVH

SEQ ID NO: 159519 - protein, 9 aa, Homo Sapiens
VAFPKSLVA

SEQ ID NO: 159520 - protein, 9 aa, Homo Sapiens
VAFPSPAEL

SEQ ID NO: 159521 - protein, 9 aa, Homo Sapiens
VAFPSSSVY

SEQ ID NO: 159522 - protein, 9 aa, Homo Sapiens
VAFPTEIKV

SEQ ID NO: 159523 - protein, 9 aa, Homo Sapiens
VAFSEIMSM

SEQ ID NO: 159524 - protein, 9 aa, Homo Sapiens
VAFSPVTEL

SEQ ID NO: 159525 - protein, 9 aa, Homo Sapiens
VAFSQVLTI

SEQ ID NO: 159526 - protein, 9 aa, Homo Sapiens
VAFYIPMSV

SEQ ID NO: 159527 - protein, 9 aa, Homo Sapiens
VAHYPPVQV

SEQ ID NO: 159528 - protein, 9 aa, Homo Sapiens
VAIAAARVW

SEQ ID NO: 159529 - protein, 9 aa, Homo Sapiens
VAIAKVKLY

SEQ ID NO: 159530 - protein, 9 aa, Homo Sapiens
VAIEMLLKL

SEQ ID NO: 159531 - protein, 9 aa, Homo Sapiens
VAINHIVDF

SEQ ID NO: 159532 - protein, 9 aa, Homo Sapiens
VAINLIVQH

SEQ ID NO: 159533 - protein, 9 aa, Homo Sapiens
VAINRLLSM

SEQ ID NO: 159534 - protein, 9 aa, Homo Sapiens
VAIPSYICY

SEQ ID NO: 159535 - protein, 9 aa, Homo Sapiens
VAIPVSIFY

SEQ ID NO: 159536 - protein, 9 aa, Homo Sapiens
VAIQSVRCY

SEQ ID NO: 159537 - protein, 9 aa, Homo Sapiens
VAIVRPSIV

SEQ ID NO: 159538 - protein, 9 aa, Homo Sapiens
VAKIVAETM

SEQ ID NO: 159539 - protein, 9 aa, Homo Sapiens
VAKMYISEL

SEQ ID NO: 159540 - protein, 9 aa, Homo Sapiens
VAKPPVMSF

SEQ ID NO: 159541 - protein, 9 aa, Homo Sapiens
VAKWATVTF

SEQ ID NO: 159542 - protein, 9 aa, Homo Sapiens
VALDFEQEM

SEQ ID NO: 159543 - protein, 9 aa, Homo Sapiens
VALDKVIEI

SEQ ID NO: 159544 - protein, 9 aa, Homo Sapiens
VALLRVTPF

SEQ ID NO: 159545 - protein, 9 aa, Homo Sapiens
VALNFIISY

SEQ ID NO: 159546 - protein, 9 aa, Homo Sapiens
VALPMVLVL

SEQ ID NO: 159547 - protein, 9 aa, Homo Sapiens
VAMERVSVL

SEQ ID NO: 159548 - protein, 9 aa, Homo Sapiens
VAMGRVVKV

SEQ ID NO: 159549 - protein, 9 aa, Homo Sapiens
VAMKFAQVF

SEQ ID NO: 159550 - protein, 9 aa, Homo Sapiens
VANPNSAIF

SEQ ID NO: 159551 - protein, 9 aa, Homo Sapiens
VARDLRAEF

SEQ ID NO: 159552 - protein, 9 aa, Homo Sapiens
VARPDVVEM

SEQ ID NO: 159553 - protein, 9 aa, Homo Sapiens
VARSNILTL

SEQ ID NO: 159554 - protein, 9 aa, Homo Sapiens
VASAVFGVI

SEQ ID NO: 159555 - protein, 9 aa, Homo Sapiens
VASDLVMKV

SEQ ID NO: 159556 - protein, 9 aa, Homo Sapiens
VASEGIKRY

SEQ ID NO: 159557 - protein, 9 aa, Homo Sapiens
VASEIMAVL

SEQ ID NO: 159558 - protein, 9 aa, Homo Sapiens
VASGMILVM

SEQ ID NO: 159559 - protein, 9 aa, Homo Sapiens
VASNVPKVV

SEQ ID NO: 159560 - protein, 9 aa, Homo Sapiens
VASPFYLII

SEQ ID NO: 159561 - protein, 9 aa, Homo Sapiens
VASPQVHFI

SEQ ID NO: 159562 - protein, 9 aa, Homo Sapiens
VASQLPRIF

SEQ ID NO: 159563 - protein, 9 aa, Homo Sapiens
VATDFFTVL

SEQ ID NO: 159564 - protein, 9 aa, Homo Sapiens
VATFILQKI

SEQ ID NO: 159565 - protein, 9 aa, Homo Sapiens
VATSRIIKY

SEQ ID NO: 159566 - protein, 9 aa, Homo Sapiens
VAVCRIPVL

SEQ ID NO: 159567 - protein, 9 aa, Homo Sapiens
VAVDGLNQL

SEQ ID NO: 159568 - protein, 9 aa, Homo Sapiens
VAVEFIQEW

SEQ ID NO: 159569 - protein, 9 aa, Homo Sapiens
VAVGFPMMI

SEQ ID NO: 159570 - protein, 9 aa, Homo Sapiens
VAVGRALYY

SEQ ID NO: 159571 - protein, 9 aa, Homo Sapiens
VAVGVIKAV

SEQ ID NO: 159572 - protein, 9 aa, Homo Sapiens
VAVHLILYV

SEQ ID NO: 159573 - protein, 9 aa, Homo Sapiens
VAVNYIPEV

SEQ ID NO: 159574 - protein, 9 aa, Homo Sapiens
VAVPLGMTV

SEQ ID NO: 159575 - protein, 9 aa, Homo Sapiens
VAVPVAVTF

SEQ ID NO: 159576 - protein, 9 aa, Homo Sapiens
VAWDIPITY

SEQ ID NO: 159577 - protein, 9 aa, Homo Sapiens
VAYGKGTYF

SEQ ID NO: 159578 - protein, 9 aa, Homo Sapiens
VAYGQVLGV

SEQ ID NO: 159579 - protein, 9 aa, Homo Sapiens
VAYMNPIAM

SEQ ID NO: 159580 - protein, 9 aa, Homo Sapiens
VAYPCAILY

SEQ ID NO: 159581 - protein, 9 aa, Homo Sapiens
VAYPGIPKL

SEQ ID NO: 159582 - protein, 9 aa, Homo Sapiens
VAYPLYILY

SEQ ID NO: 159583 - protein, 9 aa, Homo Sapiens
VAYQHAFLY

SEQ ID NO: 159584 - protein, 9 aa, Homo Sapiens
VAYQKDRRW

SEQ ID NO: 159585 - protein, 9 aa, Homo Sapiens
VAYWDVLKA

SEQ ID NO: 159586 - protein, 9 aa, Homo Sapiens
VAYWRQAGL

SEQ ID NO: 159587 - protein, 9 aa, Homo Sapiens
VFYPYPQYF

SEQ ID NO: 159588 - protein, 9 aa, Homo Sapiens
VGFDAVMRV

SEQ ID NO: 159589 - protein, 9 aa, Homo Sapiens
VGFEEVIVV

SEQ ID NO: 159590 - protein, 9 aa, Homo Sapiens
VGIENIHVM

SEQ ID NO: 159591 - protein, 9 aa, Homo Sapiens
VGIPHIRWY

SEQ ID NO: 159592 - protein, 9 aa, Homo Sapiens
VGVDFALKV

SEQ ID NO: 159593 - protein, 9 aa, Homo Sapiens
VGYDGPIYM

SEQ ID NO: 159594 - protein, 9 aa, Homo Sapiens
VIGDVIRVY

SEQ ID NO: 159595 - protein, 9 aa, Homo Sapiens
VIPPFVFMV

SEQ ID NO: 159596 - protein, 9 aa, Homo Sapiens
VLFEHAVGY

SEQ ID NO: 159597 - protein, 9 aa, Homo Sapiens
VLFGKPMVV

SEQ ID NO: 159598 - protein, 9 aa, Homo Sapiens
VLFHNTIYY

SEQ ID NO: 159599 - protein, 9 aa, Homo Sapiens
VLFTQLIYY

SEQ ID NO: 159600 - protein, 9 aa, Homo Sapiens
VLVDHVVEF

SEQ ID NO: 159601 - protein, 9 aa, Homo Sapiens
VLYDRVLKY

SEQ ID NO: 159602 - protein, 9 aa, Homo Sapiens
VQIDITRVF

SEQ ID NO: 159603 - protein, 9 aa, Homo Sapiens
VQINVPITF

SEQ ID NO: 159604 - protein, 9 aa, Homo Sapiens
VSAAIVKEL

SEQ ID NO: 159605 - protein, 9 aa, Homo Sapiens
VSAENILTV

SEQ ID NO: 159606 - protein, 9 aa, Homo Sapiens
VSFPYVIAL

SEQ ID NO: 159607 - protein, 9 aa, Homo Sapiens
VSFQEVVTF

SEQ ID NO: 159608 - protein, 9 aa, Homo Sapiens
VSGDFVKVY

SEQ ID NO: 159609 - protein, 9 aa, Homo Sapiens
VSSHIASML

SEQ ID NO: 159610 - protein, 9 aa, Homo Sapiens
VSVPFPVTH

SEQ ID NO: 159611 - protein, 9 aa, Homo Sapiens
VSVPLIVRY

SEQ ID NO: 159612 - protein, 9 aa, Homo Sapiens
VSVQGIIIY

SEQ ID NO: 159613 - protein, 9 aa, Homo Sapiens
VSYGSIVTY

SEQ ID NO: 159614 - protein, 9 aa, Homo Sapiens
VSYSLPIVL

SEQ ID NO: 159615 - protein, 9 aa, Homo Sapiens
VTFPECVRW

SEQ ID NO: 159616 - protein, 9 aa, Homo Sapiens
VTFPGIKLI

SEQ ID NO: 159617 - protein, 9 aa, Homo Sapiens
VTFSGIHLL

SEQ ID NO: 159618 - protein, 9 aa, Homo Sapiens
VTIDRVMSY

SEQ ID NO: 159619 - protein, 9 aa, Homo Sapiens
VTIVKPIVY

SEQ ID NO: 159620 - protein, 9 aa, Homo Sapiens
VTKPNPSFM

SEQ ID NO: 159621 - protein, 9 aa, Homo Sapiens
VTSCIHNIL

SEQ ID NO: 159622 - protein, 9 aa, Homo Sapiens
VTSPVLVIH

SEQ ID NO: 159623 - protein, 9 aa, Homo Sapiens
VTVAFVQEY

SEQ ID NO: 159624 - protein, 9 aa, Homo Sapiens
VTYGFPIML

SEQ ID NO: 159625 - protein, 9 aa, Homo Sapiens
VTYNYPVHY

SEQ ID NO: 159626 - protein, 9 aa, Homo Sapiens
VTYPGELLL

SEQ ID NO: 159627 - protein, 9 aa, Homo Sapiens
VTYSFRQSF

SEQ ID NO: 159628 - protein, 9 aa, Homo Sapiens
VTYSHEVYF

SEQ ID NO: 159629 - protein, 9 aa, Homo Sapiens
VVKMPSGEF

SEQ ID NO: 159630 - protein, 9 aa, Homo Sapiens
VVKPPGSSL

SEQ ID NO: 159631 - protein, 9 aa, Homo Sapiens
VVPQFVVFY

SEQ ID NO: 159632 - protein, 9 aa, Homo Sapiens
VVYPILVEF

SEQ ID NO: 159633 - protein, 9 aa, Homo Sapiens
VVYPWTQRF

SEQ ID NO: 159634 - protein, 9 aa, Homo Sapiens
VWKLRIVSY

SEQ ID NO: 159635 - protein, 9 aa, Homo Sapiens
WAAPIRKLY

SEQ ID NO: 159636 - protein, 9 aa, Homo Sapiens
WAYARTINV

SEQ ID NO: 159637 - protein, 9 aa, Homo Sapiens
WAYPRQVFI

SEQ ID NO: 159638 - protein, 9 aa, Homo Sapiens
WGYPHPFLI

SEQ ID NO: 159639 - protein, 9 aa, Homo Sapiens
WSYPYEHSY

SEQ ID NO: 159640 - protein, 9 aa, Homo Sapiens
YAAAQLRQY

SEQ ID NO: 159641 - protein, 9 aa, Homo Sapiens
YAAELIERV

SEQ ID NO: 159642 - protein, 9 aa, Homo Sapiens
YAAGFIFTT

SEQ ID NO: 159643 - protein, 9 aa, Homo Sapiens
YAAGVHSVL

SEQ ID NO: 159644 - protein, 9 aa, Homo Sapiens
YAALHHRIL

SEQ ID NO: 159645 - protein, 9 aa, Homo Sapiens
YAANLKNVM

SEQ ID NO: 159646 - protein, 9 aa, Homo Sapiens
YAAPHFFHL

SEQ ID NO: 159647 - protein, 9 aa, Homo Sapiens
YAAPQLRSI

SEQ ID NO: 159648 - protein, 9 aa, Homo Sapiens
YAAPWFLTL

SEQ ID NO: 159649 - protein, 9 aa, Homo Sapiens
YAAVKIHQL

SEQ ID NO: 159650 - protein, 9 aa, Homo Sapiens
YAFAHILTV

SEQ ID NO: 159651 - protein, 9 aa, Homo Sapiens
YAFDFARQS

SEQ ID NO: 159652 - protein, 9 aa, Homo Sapiens
YAFDRVFQS

SEQ ID NO: 159653 - protein, 9 aa, Homo Sapiens
YAFGGGCEL

SEQ ID NO: 159654 - protein, 9 aa, Homo Sapiens
YAFGKFPTV

SEQ ID NO: 159655 - protein, 9 aa, Homo Sapiens
YAFLRREYY

SEQ ID NO: 159656 - protein, 9 aa, Homo Sapiens
YAFNGTQRF

SEQ ID NO: 159657 - protein, 9 aa, Homo Sapiens
YAFNMKATV

SEQ ID NO: 159658 - protein, 9 aa, Homo Sapiens
YAFPKAVSV

SEQ ID NO: 159659 - protein, 9 aa, Homo Sapiens
YAFPKAVTV

SEQ ID NO: 159660 - protein, 9 aa, Homo Sapiens
YAFPKEFPY

SEQ ID NO: 159661 - protein, 9 aa, Homo Sapiens
YAFPKSITV

SEQ ID NO: 159662 - protein, 9 aa, Homo Sapiens
YAFPLAHSL

SEQ ID NO: 159663 - protein, 9 aa, Homo Sapiens
YAFPRVRII

SEQ ID NO: 159664 - protein, 9 aa, Homo Sapiens
YAFPVSNNL

SEQ ID NO: 159665 - protein, 9 aa, Homo Sapiens
YAFPYIILV

SEQ ID NO: 159666 - protein, 9 aa, Homo Sapiens
YAFSGVEEL

SEQ ID NO: 159667 - protein, 9 aa, Homo Sapiens
YAFVRPVIL

SEQ ID NO: 159668 - protein, 9 aa, Homo Sapiens
YAHFPINVV

SEQ ID NO: 159669 - protein, 9 aa, Homo Sapiens
YAIDNPLHY

SEQ ID NO: 159670 - protein, 9 aa, Homo Sapiens
YAIDSVLEV

SEQ ID NO: 159671 - protein, 9 aa, Homo Sapiens
YAIEKVREI

SEQ ID NO: 159672 - protein, 9 aa, Homo Sapiens
YAIEVDPVL

SEQ ID NO: 159673 - protein, 9 aa, Homo Sapiens
YAIGLVMRL

SEQ ID NO: 159674 - protein, 9 aa, Homo Sapiens
YAIHKIAKM

SEQ ID NO: 159675 - protein, 9 aa, Homo Sapiens
YAIPMLQLL

SEQ ID NO: 159676 - protein, 9 aa, Homo Sapiens
YAISMARKI

SEQ ID NO: 159677 - protein, 9 aa, Homo Sapiens
YAITRVLRL

SEQ ID NO: 159678 - protein, 9 aa, Homo Sapiens
YAKDMLTSL

SEQ ID NO: 159679 - protein, 9 aa, Homo Sapiens
YAKEFLPFL

SEQ ID NO: 159680 - protein, 9 aa, Homo Sapiens
YAKIHIPII

SEQ ID NO: 159681 - protein, 9 aa, Homo Sapiens
YAKIVEIPF

SEQ ID NO: 159682 - protein, 9 aa, Homo Sapiens
YAKNNIPII

SEQ ID NO: 159683 - protein, 9 aa, Homo Sapiens
YAKPYFLRL

SEQ ID NO: 159684 - protein, 9 aa, Homo Sapiens
YAKRPGIGL

SEQ ID NO: 159685 - protein, 9 aa, Homo Sapiens
YALNRITVW

SEQ ID NO: 159686 - protein, 9 aa, Homo Sapiens
YAMDIVKGL

SEQ ID NO: 159687 - protein, 9 aa, Homo Sapiens
YAMRYFATV

SEQ ID NO: 159688 - protein, 9 aa, Homo Sapiens
YANYYTREV

SEQ ID NO: 159689 - protein, 9 aa, Homo Sapiens
YAPECLKEY

SEQ ID NO: 159690 - protein, 9 aa, Homo Sapiens
YAQLHSFTL

SEQ ID NO: 159691 - protein, 9 aa, Homo Sapiens
YARQLEMIV

SEQ ID NO: 159692 - protein, 9 aa, Homo Sapiens
YASDFHNVL

SEQ ID NO: 159693 - protein, 9 aa, Homo Sapiens
YASNITSVL

SEQ ID NO: 159694 - protein, 9 aa, Homo Sapiens
YASPVVAFY

SEQ ID NO: 159695 - protein, 9 aa, Homo Sapiens
YASQQIRQI

SEQ ID NO: 159696 - protein, 9 aa, Homo Sapiens
YASQYIARY

SEQ ID NO: 159697 - protein, 9 aa, Homo Sapiens
YASRFVQLV

SEQ ID NO: 159698 - protein, 9 aa, Homo Sapiens
YASSKLLKI

SEQ ID NO: 159699 - protein, 9 aa, Homo Sapiens
YASTIVSAL

SEQ ID NO: 159700 - protein, 9 aa, Homo Sapiens
YATASLRKL

SEQ ID NO: 159701 - protein, 9 aa, Homo Sapiens
YATDLVVCV

SEQ ID NO: 159702 - protein, 9 aa, Homo Sapiens
YATEKLRMI

SEQ ID NO: 159703 - protein, 9 aa, Homo Sapiens
YATFIVTNY

SEQ ID NO: 159704 - protein, 9 aa, Homo Sapiens
YATIILSKM

SEQ ID NO: 159705 - protein, 9 aa, Homo Sapiens
YATKHLRVL

SEQ ID NO: 159706 - protein, 9 aa, Homo Sapiens
YATTVIPRV

SEQ ID NO: 159707 - protein, 9 aa, Homo Sapiens
YAVDRAITH

SEQ ID NO: 159708 - protein, 9 aa, Homo Sapiens
YAVNSQFTM

SEQ ID NO: 159709 - protein, 9 aa, Homo Sapiens
YAYAAQNLL

SEQ ID NO: 159710 - protein, 9 aa, Homo Sapiens
YAYDAKIEI

SEQ ID NO: 159711 - protein, 9 aa, Homo Sapiens
YAYEKPHVV

SEQ ID NO: 159712 - protein, 9 aa, Homo Sapiens
YAYEWQRCL

SEQ ID NO: 159713 - protein, 9 aa, Homo Sapiens
YAYLKAIVL

SEQ ID NO: 159714 - protein, 9 aa, Homo Sapiens
YAYLYIRML

SEQ ID NO: 159715 - protein, 9 aa, Homo Sapiens
YAYPGVLLI

SEQ ID NO: 159716 - protein, 9 aa, Homo Sapiens
YAYPYSYYY

SEQ ID NO: 159717 - protein, 9 aa, Homo Sapiens
YAYRDAVFL

SEQ ID NO: 159718 - protein, 9 aa, Homo Sapiens
YAYTAQLKA

SEQ ID NO: 159719 - protein, 9 aa, Homo Sapiens
YAYTGRLEL

SEQ ID NO: 159720 - protein, 9 aa, Homo Sapiens
YAYTSQIEI

SEQ ID NO: 159721 - protein, 9 aa, Homo Sapiens
YAYTSRVIL

SEQ ID NO: 159722 - protein, 9 aa, Homo Sapiens
YFHCTLIGY

SEQ ID NO: 159723 - protein, 9 aa, Homo Sapiens
YFVPLVKRL

SEQ ID NO: 159724 - protein, 9 aa, Homo Sapiens
YGAEIVRRY

SEQ ID NO: 159725 - protein, 9 aa, Homo Sapiens
YGAEVISVL

SEQ ID NO: 159726 - protein, 9 aa, Homo Sapiens
YGFLHVIVH

SEQ ID NO: 159727 - protein, 9 aa, Homo Sapiens
YGIDTIRLY

SEQ ID NO: 159728 - protein, 9 aa, Homo Sapiens
YGLTFTEKW

SEQ ID NO: 159729 - protein, 9 aa, Homo Sapiens
YGMERVWCV

SEQ ID NO: 159730 - protein, 9 aa, Homo Sapiens
YGSPNALVL

SEQ ID NO: 159731 - protein, 9 aa, Homo Sapiens
YGYDNVKEY

SEQ ID NO: 159732 - protein, 9 aa, Homo Sapiens
YGYEHILTL

SEQ ID NO: 159733 - protein, 9 aa, Homo Sapiens
YGYGIRYEY

SEQ ID NO: 159734 - protein, 9 aa, Homo Sapiens
YGYNQRPPY

SEQ ID NO: 159735 - protein, 9 aa, Homo Sapiens
YGYSNPKIL

SEQ ID NO: 159736 - protein, 9 aa, Homo Sapiens
YGYYRTVIF

SEQ ID NO: 159737 - protein, 9 aa, Homo Sapiens
YIATIHSRL

SEQ ID NO: 159738 - protein, 9 aa, Homo Sapiens
YIFEEPFTI

SEQ ID NO: 159739 - protein, 9 aa, Homo Sapiens
YIFTTPKSV

SEQ ID NO: 159740 - protein, 9 aa, Homo Sapiens
YIIDTTGKL

SEQ ID NO: 159741 - protein, 9 aa, Homo Sapiens
YIIKDKHIL

SEQ ID NO: 159742 - protein, 9 aa, Homo Sapiens
YIKDFFEQM

SEQ ID NO: 159743 - protein, 9 aa, Homo Sapiens
YIPDFLTLL

SEQ ID NO: 159744 - protein, 9 aa, Homo Sapiens
YITGHVLVV

SEQ ID NO: 159745 - protein, 9 aa, Homo Sapiens
YIVDHTIIM

SEQ ID NO: 159746 - protein, 9 aa, Homo Sapiens
YLADIFTKL

SEQ ID NO: 159747 - protein, 9 aa, Homo Sapiens
YLADLYHFV

SEQ ID NO: 159748 - protein, 9 aa, Homo Sapiens
YLAPHVRTL

SEQ ID NO: 159749 - protein, 9 aa, Homo Sapiens
YLFEWRTQY

SEQ ID NO: 159750 - protein, 9 aa, Homo Sapiens
YLIKYIAIV

SEQ ID NO: 159751 - protein, 9 aa, Homo Sapiens
YLIPIVVRY

SEQ ID NO: 159752 - protein, 9 aa, Homo Sapiens
YLITHPLAV

SEQ ID NO: 159753 - protein, 9 aa, Homo Sapiens
YLKDFFSNV

SEQ ID NO: 159754 - protein, 9 aa, Homo Sapiens
YLKEFIHIL

SEQ ID NO: 159755 - protein, 9 aa, Homo Sapiens
YLSMVFSIV

SEQ ID NO: 159756 - protein, 9 aa, Homo Sapiens
YMISIVHIY

SEQ ID NO: 159757 - protein, 9 aa, Homo Sapiens
YMVTIVHIY

SEQ ID NO: 159758 - protein, 9 aa, Homo Sapiens
YNFEKPVVM

SEQ ID NO: 159759 - protein, 9 aa, Homo Sapiens
YNFEYSVVF

SEQ ID NO: 159760 - protein, 9 aa, Homo Sapiens
YNYIRIMVM

SEQ ID NO: 159761 - protein, 9 aa, Homo Sapiens
YQADIERMY

SEQ ID NO: 159762 - protein, 9 aa, Homo Sapiens
YQFTGIKKY

SEQ ID NO: 159763 - protein, 9 aa, Homo Sapiens
YQITSVIQY

SEQ ID NO: 159764 - protein, 9 aa, Homo Sapiens
YQKPFQTLM

SEQ ID NO: 159765 - protein, 9 aa, Homo Sapiens
YQTDLVNIM

SEQ ID NO: 159766 - protein, 9 aa, Homo Sapiens
YQYPRPLLI

SEQ ID NO: 159767 - protein, 9 aa, Homo Sapiens
YQYPVIIHL

SEQ ID NO: 159768 - protein, 9 aa, Homo Sapiens
YSADGHSIL

SEQ ID NO: 159769 - protein, 9 aa, Homo Sapiens
YSAPVIHVL

SEQ ID NO: 159770 - protein, 9 aa, Homo Sapiens
YSFDYPSDM

SEQ ID NO: 159771 - protein, 9 aa, Homo Sapiens
YSFGGCHRY

SEQ ID NO: 159772 - protein, 9 aa, Homo Sapiens
YSFHKFHYL

SEQ ID NO: 159773 - protein, 9 aa, Homo Sapiens
YSFYLPIAA

SEQ ID NO: 159774 - protein, 9 aa, Homo Sapiens
YSHPHVRLL

SEQ ID NO: 159775 - protein, 9 aa, Homo Sapiens
YSINWTQKL

SEQ ID NO: 159776 - protein, 9 aa, Homo Sapiens
YSISERLEM

SEQ ID NO: 159777 - protein, 9 aa, Homo Sapiens
YSKEGWEYV

SEQ ID NO: 159778 - protein, 9 aa, Homo Sapiens
YSKLPGVSL

SEQ ID NO: 159779 - protein, 9 aa, Homo Sapiens
YSLEHTVQF

SEQ ID NO: 159780 - protein, 9 aa, Homo Sapiens
YSMYREFWA

SEQ ID NO: 159781 - protein, 9 aa, Homo Sapiens
YSSGLVRLY

SEQ ID NO: 159782 - protein, 9 aa, Homo Sapiens
YSSPEILRV

SEQ ID NO: 159783 - protein, 9 aa, Homo Sapiens
YSSPLFRSL

SEQ ID NO: 159784 - protein, 9 aa, Homo Sapiens
YSVPFYPTF

SEQ ID NO: 159785 - protein, 9 aa, Homo Sapiens
YSYFSPRTM

SEQ ID NO: 159786 - protein, 9 aa, Homo Sapiens
YSYIDAVCY

SEQ ID NO: 159787 - protein, 9 aa, Homo Sapiens
YSYNIRHSF

SEQ ID NO: 159788 - protein, 9 aa, Homo Sapiens
YSYPELVKM

SEQ ID NO: 159789 - protein, 9 aa, Homo Sapiens
YSYPETPLY

SEQ ID NO: 159790 - protein, 9 aa, Homo Sapiens
YSYPSPITA

SEQ ID NO: 159791 - protein, 9 aa, Homo Sapiens
YTFGRIVIY

SEQ ID NO: 159792 - protein, 9 aa, Homo Sapiens
YTFNKVLML

SEQ ID NO: 159793 - protein, 9 aa, Homo Sapiens
YTFPAGVSV

SEQ ID NO: 159794 - protein, 9 aa, Homo Sapiens
YTFPFQQLM

SEQ ID NO: 159795 - protein, 9 aa, Homo Sapiens
YTFSEPFHL

SEQ ID NO: 159796 - protein, 9 aa, Homo Sapiens
YTHEVVTLW

SEQ ID NO: 159797 - protein, 9 aa, Homo Sapiens
YTIEFLRHL

SEQ ID NO: 159798 - protein, 9 aa, Homo Sapiens
YTIENPRHF

SEQ ID NO: 159799 - protein, 9 aa, Homo Sapiens
YTIGGVKIY

SEQ ID NO: 159800 - protein, 9 aa, Homo Sapiens
YTIPLAIKL

SEQ ID NO: 159801 - protein, 9 aa, Homo Sapiens
YTKNYLPLL

SEQ ID NO: 159802 - protein, 9 aa, Homo Sapiens
YTMPNFRQY

SEQ ID NO: 159803 - protein, 9 aa, Homo Sapiens
YTPDWIFLL

SEQ ID NO: 159804 - protein, 9 aa, Homo Sapiens
YTSGDVRVW

SEQ ID NO: 159805 - protein, 9 aa, Homo Sapiens
YTSPDFLYV

SEQ ID NO: 159806 - protein, 9 aa, Homo Sapiens
YTTDFIYQL

SEQ ID NO: 159807 - protein, 9 aa, Homo Sapiens
YTTDRVMTV

SEQ ID NO: 159808 - protein, 9 aa, Homo Sapiens
YTYEKLLWT

SEQ ID NO: 159809 - protein, 9 aa, Homo Sapiens
YTYLRINFY

SEQ ID NO: 159810 - protein, 9 aa, Homo Sapiens
YTYPWVYNY

SEQ ID NO: 159811 - protein, 9 aa, Homo Sapiens
YTYYYPHYL

SEQ ID NO: 159812 - protein, 9 aa, Homo Sapiens
YVAELIQQL

SEQ ID NO: 159813 - protein, 9 aa, Homo Sapiens
YVFPGVTRL

SEQ ID NO: 159814 - protein, 9 aa, Homo Sapiens
YVGPAKVIV

SEQ ID NO: 159815 - protein, 9 aa, Homo Sapiens
YVIELQHVV

SEQ ID NO: 159816 - protein, 9 aa, Homo Sapiens
YVLAFWALL

SEQ ID NO: 159817 - protein, 9 aa, Homo Sapiens
YVPDIVRCV

SEQ ID NO: 159818 - protein, 9 aa, Homo Sapiens
YVSPRILTA

SEQ ID NO: 159819 - protein, 9 aa, Homo Sapiens
YVTSLLKMY

SEQ ID NO: 159820 - protein, 9 aa, Homo Sapiens
YVTTSTRTY

SEQ ID NO: 159821 - protein, 9 aa, Homo Sapiens
YVVPFVAKV

SEQ ID NO: 159822 - protein, 9 aa, Homo Sapiens
YVYEYLLHI

SEQ ID NO: 159823 - protein, 9 aa, Homo Sapiens
YVYEYLLHV

SEQ ID NO: 159824 - protein, 9 aa, Homo Sapiens
YVYMFLVKW

SEQ ID NO: 159825 - protein, 9 aa, Homo Sapiens
YVYPKYLKY

SEQ ID NO: 159826 - protein, 9 aa, Homo Sapiens
YWIHWVRQM

SEQ ID NO: 159827 - protein, 10 aa, Homo Sapiens
AAAGFLLQVL

SEQ ID NO: 159828 - protein, 10 aa, Homo Sapiens
AAAPQLLIVL

SEQ ID NO: 159829 - protein, 10 aa, Homo Sapiens
AAFGGHPQCL

SEQ ID NO: 159830 - protein, 10 aa, Homo Sapiens
AAFGGNPKSV

SEQ ID NO: 159831 - protein, 10 aa, Homo Sapiens
AAFIPTGSVL

SEQ ID NO: 159832 - protein, 10 aa, Homo Sapiens
AAFPGASLYL

SEQ ID NO: 159833 - protein, 10 aa, Homo Sapiens
AAFTADPLSL

SEQ ID NO: 159834 - protein, 10 aa, Homo Sapiens
AAIGLVIYYL

SEQ ID NO: 159835 - protein, 10 aa, Homo Sapiens
AAVHIILVIN

SEQ ID NO: 159836 - protein, 10 aa, Homo Sapiens
AAYIYIRGEF

SEQ ID NO: 159837 - protein, 10 aa, Homo Sapiens
ALIEFIRSEY

SEQ ID NO: 159838 - protein, 10 aa, Homo Sapiens
ASFDGRISVY

SEQ ID NO: 159839 - protein, 10 aa, Homo Sapiens
ASYSGLMRIE

SEQ ID NO: 159840 - protein, 10 aa, Homo Sapiens
CAYDRIVVAG

SEQ ID NO: 159841 - protein, 10 aa, Homo Sapiens
CSFSGYKIYP

SEQ ID NO: 159842 - protein, 10 aa, Homo Sapiens
FAADIPRILV

SEQ ID NO: 159843 - protein, 10 aa, Homo Sapiens
FAFESDLHSL

SEQ ID NO: 159844 - protein, 10 aa, Homo Sapiens
FAFNRKRNVL

SEQ ID NO: 159845 - protein, 10 aa, Homo Sapiens
FAFQAEIAQL

SEQ ID NO: 159846 - protein, 10 aa, Homo Sapiens
FAFRGCPHVL

SEQ ID NO: 159847 - protein, 10 aa, Homo Sapiens
FAFSPDGRHL

SEQ ID NO: 159848 - protein, 10 aa, Homo Sapiens
FAGLVQEISF

SEQ ID NO: 159849 - protein, 10 aa, Homo Sapiens
FAIGGIARTY

SEQ ID NO: 159850 - protein, 10 aa, Homo Sapiens
FAKCTGMIIL

SEQ ID NO: 159851 - protein, 10 aa, Homo Sapiens
FAKGMSPAVL

SEQ ID NO: 159852 - protein, 10 aa, Homo Sapiens
FAKTFVGTPY

SEQ ID NO: 159853 - protein, 10 aa, Homo Sapiens
FANDLKPKVY

SEQ ID NO: 159854 - protein, 10 aa, Homo Sapiens
FARYPNGVVV

SEQ ID NO: 159855 - protein, 10 aa, Homo Sapiens
FASGLIHRVC

SEQ ID NO: 159856 - protein, 10 aa, Homo Sapiens
FASKLVLKAL

SEQ ID NO: 159857 - protein, 10 aa, Homo Sapiens
FASYMEQHLM

SEQ ID NO: 159858 - protein, 10 aa, Homo Sapiens
FAWEPNGSKF

SEQ ID NO: 159859 - protein, 10 aa, Homo Sapiens
FAYPAIRYLL

SEQ ID NO: 159860 - protein, 10 aa, Homo Sapiens
FAYPNRPDVL

SEQ ID NO: 159861 - protein, 10 aa, Homo Sapiens
FFLDHVRTSF

SEQ ID NO: 159862 - protein, 10 aa, Homo Sapiens
FLFDGSPTYV

SEQ ID NO: 159863 - protein, 10 aa, Homo Sapiens
FLFDKVVIVC

SEQ ID NO: 159864 - protein, 10 aa, Homo Sapiens
FLYPFPLALF

SEQ ID NO: 159865 - protein, 10 aa, Homo Sapiens
FQNPQTHVIE

SEQ ID NO: 159866 - protein, 10 aa, Homo Sapiens
FSFEGPEKVH

SEQ ID NO: 159867 - protein, 10 aa, Homo Sapiens
FSFGGKLVTF

SEQ ID NO: 159868 - protein, 10 aa, Homo Sapiens
FSNDIPHVVR

SEQ ID NO: 159869 - protein, 10 aa, Homo Sapiens
FTFDQDPSVL

SEQ ID NO: 159870 - protein, 10 aa, Homo Sapiens
FTPFVDPRVY

SEQ ID NO: 159871 - protein, 10 aa, Homo Sapiens
FVAPFPLSIW

SEQ ID NO: 159872 - protein, 10 aa, Homo Sapiens
FVHPDPLWIP

SEQ ID NO: 159873 - protein, 10 aa, Homo Sapiens
FVVDHVIKIT

SEQ ID NO: 159874 - protein, 10 aa, Homo Sapiens
FVYPEESLVI

SEQ ID NO: 159875 - protein, 10 aa, Homo Sapiens
FVYPGNPLRH

SEQ ID NO: 159876 - protein, 10 aa, Homo Sapiens
GGEVLSHSLL

SEQ ID NO: 159877 - protein, 10 aa, Homo Sapiens
GPPPPPGKPQ

SEQ ID NO: 159878 - protein, 10 aa, Homo Sapiens
HAAPFQNILP

SEQ ID NO: 159879 - protein, 10 aa, Homo Sapiens
HAFDGRPSVA

SEQ ID NO: 159880 - protein, 10 aa, Homo Sapiens
HQSGIVQLLW

SEQ ID NO: 159881 - protein, 10 aa, Homo Sapiens
IAGPVLLILV

SEQ ID NO: 159882 - protein, 10 aa, Homo Sapiens
IAGPVVEISH

SEQ ID NO: 159883 - protein, 10 aa, Homo Sapiens
IAVDPRHLSL

SEQ ID NO: 159884 - protein, 10 aa, Homo Sapiens
IIPSWPLKVL

SEQ ID NO: 159885 - protein, 10 aa, Homo Sapiens
ISSHIPLIIQ

SEQ ID NO: 159886 - protein, 10 aa, Homo Sapiens
KAFPFHIIFD

SEQ ID NO: 159887 - protein, 10 aa, Homo Sapiens
KAFQKIVVLF

SEQ ID NO: 159888 - protein, 10 aa, Homo Sapiens
KAKWPDRITL

SEQ ID NO: 159889 - protein, 10 aa, Homo Sapiens
KAVDIVKQVW

SEQ ID NO: 159890 - protein, 10 aa, Homo Sapiens
KAVGWRLIAL

SEQ ID NO: 159891 - protein, 10 aa, Homo Sapiens
KSFEGNVFMY

SEQ ID NO: 159892 - protein, 10 aa, Homo Sapiens
KTPDFILQVP

SEQ ID NO: 159893 - protein, 10 aa, Homo Sapiens
LAFDPSGQRL

SEQ ID NO: 159894 - protein, 10 aa, Homo Sapiens
LAFSNDGTTL

SEQ ID NO: 159895 - protein, 10 aa, Homo Sapiens
LLYPFAPLIL

SEQ ID NO: 159896 - protein, 10 aa, Homo Sapiens
LMAFLLPLII

SEQ ID NO: 159897 - protein, 10 aa, Homo Sapiens
LSFPTTKTYF

SEQ ID NO: 159898 - protein, 10 aa, Homo Sapiens
LSSFVGGLSV

SEQ ID NO: 159899 - protein, 10 aa, Homo Sapiens
MAFDPTSTLL

SEQ ID NO: 159900 - protein, 10 aa, Homo Sapiens
MAFLLPLIIV

SEQ ID NO: 159901 - protein, 10 aa, Homo Sapiens
MATPLLMQAL

SEQ ID NO: 159902 - protein, 10 aa, Homo Sapiens
MAVEFPLVLY

SEQ ID NO: 159903 - protein, 10 aa, Homo Sapiens
MAYGASFLSF

SEQ ID NO: 159904 - protein, 10 aa, Homo Sapiens
MIAEPAHFYL

SEQ ID NO: 159905 - protein, 10 aa, Homo Sapiens
MSVDPDRMVI

SEQ ID NO: 159906 - protein, 10 aa, Homo Sapiens
MSYEQLMQLY

SEQ ID NO: 159907 - protein, 10 aa, Homo Sapiens
NAGPAIVISF

SEQ ID NO: 159908 - protein, 10 aa, Homo Sapiens
NAIDKLFVLF

SEQ ID NO: 159909 - protein, 10 aa, Homo Sapiens
NIKAPGEQTV

SEQ ID NO: 159910 - protein, 10 aa, Homo Sapiens
QSFPEPLIIP

SEQ ID NO: 159911 - protein, 10 aa, Homo Sapiens
RAFGIPIRVY

SEQ ID NO: 159912 - protein, 10 aa, Homo Sapiens
RAPDNIIKFY

SEQ ID NO: 159913 - protein, 10 aa, Homo Sapiens
RAYPAAITIL

SEQ ID NO: 159914 - protein, 10 aa, Homo Sapiens
RQIGVEHVVV

SEQ ID NO: 159915 - protein, 10 aa, Homo Sapiens
RTVDLFPVLP

SEQ ID NO: 159916 - protein, 10 aa, Homo Sapiens
RTVDWALAEY

SEQ ID NO: 159917 - protein, 10 aa, Homo Sapiens
SAFDRKVQFL

SEQ ID NO: 159918 - protein, 10 aa, Homo Sapiens
SAFEKPQIIA

SEQ ID NO: 159919 - protein, 10 aa, Homo Sapiens
SAPGYLPTSL

SEQ ID NO: 159920 - protein, 10 aa, Homo Sapiens
SAVDFIRTLL

SEQ ID NO: 159921 - protein, 10 aa, Homo Sapiens
SAVNIIRTFL

SEQ ID NO: 159922 - protein, 10 aa, Homo Sapiens
SAVPFLILVA

SEQ ID NO: 159923 - protein, 10 aa, Homo Sapiens
SAYPLSVEWL

SEQ ID NO: 159924 - protein, 10 aa, Homo Sapiens
SDESLIACKA

SEQ ID NO: 159925 - protein, 10 aa, Homo Sapiens
SFFENPILSF

SEQ ID NO: 159926 - protein, 10 aa, Homo Sapiens
SSFDGIIAMM

SEQ ID NO: 159927 - protein, 10 aa, Homo Sapiens
TAFHGCMELL

SEQ ID NO: 159928 - protein, 10 aa, Homo Sapiens
TAFSRLILIL

SEQ ID NO: 159929 - protein, 10 aa, Homo Sapiens
TAYPNRPMVL

SEQ ID NO: 159930 - protein, 10 aa, Homo Sapiens
TGYAVWLVLW

SEQ ID NO: 159931 - protein, 10 aa, Homo Sapiens
VAFDGDAVLF

SEQ ID NO: 159932 - protein, 10 aa, Homo Sapiens
VAHEFGAITF

SEQ ID NO: 159933 - protein, 10 aa, Homo Sapiens
VAKLIQCIVF

SEQ ID NO: 159934 - protein, 10 aa, Homo Sapiens
VAMNPTNTVF

SEQ ID NO: 159935 - protein, 10 aa, Homo Sapiens
VAVGFPMMIL

SEQ ID NO: 159936 - protein, 10 aa, Homo Sapiens
VAYEGLPLHL

SEQ ID NO: 159937 - protein, 10 aa, Homo Sapiens
VFDGPAAQPS

SEQ ID NO: 159938 - protein, 10 aa, Homo Sapiens
VSQDPRHMVL

SEQ ID NO: 159939 - protein, 10 aa, Homo Sapiens
VSWTGKPVSY

SEQ ID NO: 159940 - protein, 10 aa, Homo Sapiens
VTFPGIKLIY

SEQ ID NO: 159941 - protein, 10 aa, Homo Sapiens
VTYNYPVHYF

SEQ ID NO: 159942 - protein, 10 aa, Homo Sapiens
YAFAHILTVL

SEQ ID NO: 159943 - protein, 10 aa, Homo Sapiens
YAFDLKCDSV

SEQ ID NO: 159944 - protein, 10 aa, Homo Sapiens
YAFEYLIETL

SEQ ID NO: 159945 - protein, 10 aa, Homo Sapiens
YAFNGTQRFL

SEQ ID NO: 159946 - protein, 10 aa, Homo Sapiens
YAFPKAVSVF

SEQ ID NO: 159947 - protein, 10 aa, Homo Sapiens
YAFPKAVTVF

SEQ ID NO: 159948 - protein, 10 aa, Homo Sapiens
YAFPKSITVF

SEQ ID NO: 159949 - protein, 10 aa, Homo Sapiens
YAFPYIILVL

SEQ ID NO: 159950 - protein, 10 aa, Homo Sapiens
YATTVIPRVY

SEQ ID NO: 159951 - protein, 10 aa, Homo Sapiens
YAVDRAITHL

SEQ ID NO: 159952 - protein, 10 aa, Homo Sapiens
YAVGWGPITW

SEQ ID NO: 159953 - protein, 10 aa, Homo Sapiens
YAYDGKDYIA

SEQ ID NO: 159954 - protein, 10 aa, Homo Sapiens
YAYEKPHVVC

SEQ ID NO: 159955 - protein, 10 aa, Homo Sapiens
YAYLKAIVLF

SEQ ID NO: 159956 - protein, 10 aa, Homo Sapiens
YFIPFLPLEY

SEQ ID NO: 159957 - protein, 10 aa, Homo Sapiens
YGYDNVKEYL

SEQ ID NO: 159958 - protein, 10 aa, Homo Sapiens
YIFEEPFTIR

SEQ ID NO: 159959 - protein, 10 aa, Homo Sapiens
YMIDPSGVSY

SEQ ID NO: 159960 - protein, 10 aa, Homo Sapiens
YMILGQNGFF

SEQ ID NO: 159961 - protein, 10 aa, Homo Sapiens
YQFTGIKKYF

SEQ ID NO: 159962 - protein, 10 aa, Homo Sapiens
YTFDQKIVEW

SEQ ID NO: 159963 - protein, 10 aa, Homo Sapiens
YTFGRIVIYI

SEQ ID NO: 159964 - protein, 10 aa, Homo Sapiens
YVFDGKPPQL

SEQ ID NO: 159965 - protein, 11 aa, Homo Sapiens
AAAPQLLIVLL

SEQ ID NO: 159966 - protein, 11 aa, Homo Sapiens
AAFFVRKKSSL

SEQ ID NO: 159967 - protein, 11 aa, Homo Sapiens
AAFGAPGIISA

SEQ ID NO: 159968 - protein, 11 aa, Homo Sapiens
AAFSHTQVIEL

SEQ ID NO: 159969 - protein, 11 aa, Homo Sapiens
AAFTADPLSLL

SEQ ID NO: 159970 - protein, 11 aa, Homo Sapiens
AAIDHQIEVLL

SEQ ID NO: 159971 - protein, 11 aa, Homo Sapiens
AAINPELLQLL

SEQ ID NO: 159972 - protein, 11 aa, Homo Sapiens
AAYGELRAMVL

SEQ ID NO: 159973 - protein, 11 aa, Homo Sapiens
AAYYPSDVSSL

SEQ ID NO: 159974 - protein, 11 aa, Homo Sapiens
ASEQILLATAH

SEQ ID NO: 159975 - protein, 11 aa, Homo Sapiens
ATIDPDTISAL

SEQ ID NO: 159976 - protein, 11 aa, Homo Sapiens
CAFPYSLLIFV

SEQ ID NO: 159977 - protein, 11 aa, Homo Sapiens
FAHFPGLASEL

SEQ ID NO: 159978 - protein, 11 aa, Homo Sapiens
FAHNSNWYITF

SEQ ID NO: 159979 - protein, 11 aa, Homo Sapiens
FAKPVYPGQTL

SEQ ID NO: 159980 - protein, 11 aa, Homo Sapiens
FASSHTPRITF

SEQ ID NO: 159981 - protein, 11 aa, Homo Sapiens
FASTILHLVVM

SEQ ID NO: 159982 - protein, 11 aa, Homo Sapiens
FAVDPEKIQLY

SEQ ID NO: 159983 - protein, 11 aa, Homo Sapiens
FAYDGKDYLTL

SEQ ID NO: 159984 - protein, 11 aa, Homo Sapiens
FAYDPSNYEYL

SEQ ID NO: 159985 - protein, 11 aa, Homo Sapiens
FAYPAIRYLLY

SEQ ID NO: 159986 - protein, 11 aa, Homo Sapiens
FQNPQTHVIEN

SEQ ID NO: 159987 - protein, 11 aa, Homo Sapiens
FSFPHKFEISF

SEQ ID NO: 159988 - protein, 11 aa, Homo Sapiens
FSNDIPHVVRF

SEQ ID NO: 159989 - protein, 11 aa, Homo Sapiens
GHQQLYWSHPR

SEQ ID NO: 159990 - protein, 11 aa, Homo Sapiens
GIHETTFNSIM

SEQ ID NO: 159991 - protein, 11 aa, Homo Sapiens
GPPPPPPGKPQ

SEQ ID NO: 159992 - protein, 11 aa, Homo Sapiens
HAANIVTAIYI

SEQ ID NO: 159993 - protein, 11 aa, Homo Sapiens
HACGVIATIAF

SEQ ID NO: 159994 - protein, 11 aa, Homo Sapiens
HAFDSLSGISL

SEQ ID NO: 159995 - protein, 11 aa, Homo Sapiens
HAFSFPLLIML

SEQ ID NO: 159996 - protein, 11 aa, Homo Sapiens
HAYDGKDYISL

SEQ ID NO: 159997 - protein, 11 aa, Homo Sapiens
IAGPVLLILVH

SEQ ID NO: 159998 - protein, 11 aa, Homo Sapiens
ISSHIPLIIQF

SEQ ID NO: 159999 - protein, 11 aa, Homo Sapiens
ISSPLTKSISL

SEQ ID NO: 160000 - protein, 11 aa, Homo Sapiens
KAFENLLGQAL

SEQ ID NO: 160001 - protein, 11 aa, Homo Sapiens
KAFQKIVVLFY

SEQ ID NO: 160002 - protein, 11 aa, Homo Sapiens
KAVGHPFVIQL

SEQ ID NO: 160003 - protein, 11 aa, Homo Sapiens
LSFPTTKTYFP

SEQ ID NO: 160004 - protein, 11 aa, Homo Sapiens
LSSDLIKIIYV

SEQ ID NO: 160005 - protein, 11 aa, Homo Sapiens
LVAQIAAGMEY

SEQ ID NO: 160006 - protein, 11 aa, Homo Sapiens
MAFLLPLIIVL

SEQ ID NO: 160007 - protein, 11 aa, Homo Sapiens
MAPSETQFSHL

SEQ ID NO: 160008 - protein, 11 aa, Homo Sapiens
MLPDHVSIILL

SEQ ID NO: 160009 - protein, 11 aa, Homo Sapiens
NAVDAARLHYM

SEQ ID NO: 160010 - protein, 11 aa, Homo Sapiens
QAIDPKNLSRL

SEQ ID NO: 160011 - protein, 11 aa, Homo Sapiens
RAFEVSENGNL

SEQ ID NO: 160012 - protein, 11 aa, Homo Sapiens
RAFGGILVVVY

SEQ ID NO: 160013 - protein, 11 aa, Homo Sapiens
RIMDPDVITGY

SEQ ID NO: 160014 - protein, 11 aa, Homo Sapiens
RQIEREHLIQL

SEQ ID NO: 160015 - protein, 11 aa, Homo Sapiens
RQIGVEHVVVY

SEQ ID NO: 160016 - protein, 11 aa, Homo Sapiens
SAFGDLTIKSL

SEQ ID NO: 160017 - protein, 11 aa, Homo Sapiens
SAFPFPVTVSL

SEQ ID NO: 160018 - protein, 11 aa, Homo Sapiens
SAVNPEHLSYF

SEQ ID NO: 160019 - protein, 11 aa, Homo Sapiens
SAYDGKDYIAL

SEQ ID NO: 160020 - protein, 11 aa, Homo Sapiens
SSINPDHLSYF

SEQ ID NO: 160021 - protein, 11 aa, Homo Sapiens
SSINPDHLTYF

SEQ ID NO: 160022 - protein, 11 aa, Homo Sapiens
STINPDHLSYF

SEQ ID NO: 160023 - protein, 11 aa, Homo Sapiens
SVTQAECSGVI

SEQ ID NO: 160024 - protein, 11 aa, Homo Sapiens
TAFVEPFVILL

SEQ ID NO: 160025 - protein, 11 aa, Homo Sapiens
TAQNHPMLVEL

SEQ ID NO: 160026 - protein, 11 aa, Homo Sapiens
TIIDSDKIMVL

SEQ ID NO: 160027 - protein, 11 aa, Homo Sapiens
VASPFYLIIDH

SEQ ID NO: 160028 - protein, 11 aa, Homo Sapiens
VATPHARIIEL

SEQ ID NO: 160029 - protein, 11 aa, Homo Sapiens
VATSFIRTIEL

SEQ ID NO: 160030 - protein, 11 aa, Homo Sapiens
VAVDPSILARL

SEQ ID NO: 160031 - protein, 11 aa, Homo Sapiens
YAFPKAVSVFF

SEQ ID NO: 160032 - protein, 11 aa, Homo Sapiens
YAFPKSITVFF

SEQ ID NO: 160033 - protein, 11 aa, Homo Sapiens
YAFPRVRIITT

SEQ ID NO: 160034 - protein, 11 aa, Homo Sapiens
YAKDIGFIKLD

SEQ ID NO: 160035 - protein, 11 aa, Homo Sapiens
YAMAHTGVIFF

SEQ ID NO: 160036 - protein, 11 aa, Homo Sapiens
YASGRTTGIVM

SEQ ID NO: 160037 - protein, 11 aa, Homo Sapiens
YAVDPAQLQAL

SEQ ID NO: 160038 - protein, 11 aa, Homo Sapiens
YAYDGKDYIAL

SEQ ID NO: 160039 - protein, 11 aa, Homo Sapiens
YAYDGNRVRKW

SEQ ID NO: 160040 - protein, 11 aa, Homo Sapiens
YAYETKDALCL

SEQ ID NO: 160041 - protein, 11 aa, Homo Sapiens
YQFDKVGILTL

SEQ ID NO: 160042 - protein, 11 aa, Homo Sapiens
YQYPRPLLIAF

SEQ ID NO: 160043 - protein, 11 aa, Homo Sapiens
YTTDRVMTVSF

SEQ ID NO: 160044 - protein, 8 aa, Homo Sapiens
AFFTSKAL

SEQ ID NO: 160045 - protein, 8 aa, Homo Sapiens
AFHTASVL

SEQ ID NO: 160046 - protein, 8 aa, Homo Sapiens
AFLTGVGL

SEQ ID NO: 160047 - protein, 8 aa, Homo Sapiens
AFLVTRSM

SEQ ID NO: 160048 - protein, 8 aa, Homo Sapiens
AFMEGIAL

SEQ ID NO: 160049 - protein, 8 aa, Homo Sapiens
AFNIAEAF

SEQ ID NO: 160050 - protein, 8 aa, Homo Sapiens
AFQISKEY

SEQ ID NO: 160051 - protein, 8 aa, Homo Sapiens
AFTNRIFF

SEQ ID NO: 160052 - protein, 8 aa, Homo Sapiens
ATQVGIEW

SEQ ID NO: 160053 - protein, 8 aa, Homo Sapiens
AYFTAAQL

SEQ ID NO: 160054 - protein, 8 aa, Homo Sapiens
AYLQRIAL

SEQ ID NO: 160055 - protein, 8 aa, Homo Sapiens
AYMNHIMV

SEQ ID NO: 160056 - protein, 8 aa, Homo Sapiens
AYQVGAVL

SEQ ID NO: 160057 - protein, 8 aa, Homo Sapiens
AYSVGWEM

SEQ ID NO: 160058 - protein, 8 aa, Homo Sapiens
AYYAGHVL

SEQ ID NO: 160059 - protein, 8 aa, Homo Sapiens
CYGIRPEL

SEQ ID NO: 160060 - protein, 8 aa, Homo Sapiens
CYLTIKEM

SEQ ID NO: 160061 - protein, 8 aa, Homo Sapiens
CYNNQQVF

SEQ ID NO: 160062 - protein, 8 aa, Homo Sapiens
CYNTALRL

SEQ ID NO: 160063 - protein, 8 aa, Homo Sapiens
FFENHPYF

SEQ ID NO: 160064 - protein, 8 aa, Homo Sapiens
FFESFGDL

SEQ ID NO: 160065 - protein, 8 aa, Homo Sapiens
FFFYGKSL

SEQ ID NO: 160066 - protein, 8 aa, Homo Sapiens
FFKDGLEM

SEQ ID NO: 160067 - protein, 8 aa, Homo Sapiens
FFLEHEAL

SEQ ID NO: 160068 - protein, 8 aa, Homo Sapiens
FFLESIAM

SEQ ID NO: 160069 - protein, 8 aa, Homo Sapiens
FFLIGPPL

SEQ ID NO: 160070 - protein, 8 aa, Homo Sapiens
FFLISKEM

SEQ ID NO: 160071 - protein, 8 aa, Homo Sapiens
FFLLGKTL

SEQ ID NO: 160072 - protein, 8 aa, Homo Sapiens
FFLSHPAY

SEQ ID NO: 160073 - protein, 8 aa, Homo Sapiens
FFLVSREL

SEQ ID NO: 160074 - protein, 8 aa, Homo Sapiens
FFLVVDAY

SEQ ID NO: 160075 - protein, 8 aa, Homo Sapiens
FFPNGNAF

SEQ ID NO: 160076 - protein, 8 aa, Homo Sapiens
FFQVGSDL

SEQ ID NO: 160077 - protein, 8 aa, Homo Sapiens
FFRVVSEY

SEQ ID NO: 160078 - protein, 8 aa, Homo Sapiens
FFVPHGYL

SEQ ID NO: 160079 - protein, 8 aa, Homo Sapiens
FYAFGRVF

SEQ ID NO: 160080 - protein, 8 aa, Homo Sapiens
FYFEGTFY

SEQ ID NO: 160081 - protein, 8 aa, Homo Sapiens
FYFNTKYF

SEQ ID NO: 160082 - protein, 8 aa, Homo Sapiens
FYGFQIAM

SEQ ID NO: 160083 - protein, 8 aa, Homo Sapiens
FYGKAIEL

SEQ ID NO: 160084 - protein, 8 aa, Homo Sapiens
FYHSVQDL

SEQ ID NO: 160085 - protein, 8 aa, Homo Sapiens
FYLERSNL

SEQ ID NO: 160086 - protein, 8 aa, Homo Sapiens
FYLSGTYY

SEQ ID NO: 160087 - protein, 8 aa, Homo Sapiens
FYLTNSEY

SEQ ID NO: 160088 - protein, 8 aa, Homo Sapiens
FYNAGLAY

SEQ ID NO: 160089 - protein, 8 aa, Homo Sapiens
FYNITLAF

SEQ ID NO: 160090 - protein, 8 aa, Homo Sapiens
FYQEHPDL

SEQ ID NO: 160091 - protein, 8 aa, Homo Sapiens
FYQFVNNL

SEQ ID NO: 160092 - protein, 8 aa, Homo Sapiens
FYQLQPAM

SEQ ID NO: 160093 - protein, 8 aa, Homo Sapiens
FYTIHSCF

SEQ ID NO: 160094 - protein, 8 aa, Homo Sapiens
FYVEHPEV

SEQ ID NO: 160095 - protein, 8 aa, Homo Sapiens
FYVIGSSY

SEQ ID NO: 160096 - protein, 8 aa, Homo Sapiens
FYVNGLTL

SEQ ID NO: 160097 - protein, 8 aa, Homo Sapiens
FYVPVSEM

SEQ ID NO: 160098 - protein, 8 aa, Homo Sapiens
FYVVAESF

SEQ ID NO: 160099 - protein, 8 aa, Homo Sapiens
FYVVNSEL

SEQ ID NO: 160100 - protein, 8 aa, Homo Sapiens
FYYDGKVM

SEQ ID NO: 160101 - protein, 8 aa, Homo Sapiens
FYYFVKEF

SEQ ID NO: 160102 - protein, 8 aa, Homo Sapiens
FYYFVSAL

SEQ ID NO: 160103 - protein, 8 aa, Homo Sapiens
HFGIHEEM

SEQ ID NO: 160104 - protein, 8 aa, Homo Sapiens
HYNLQNAF

SEQ ID NO: 160105 - protein, 8 aa, Homo Sapiens
HYNNIMAL

SEQ ID NO: 160106 - protein, 8 aa, Homo Sapiens
HYQLGLAY

SEQ ID NO: 160107 - protein, 8 aa, Homo Sapiens
HYQNALYL

SEQ ID NO: 160108 - protein, 8 aa, Homo Sapiens
IFATVREL

SEQ ID NO: 160109 - protein, 8 aa, Homo Sapiens
IFFNVHSA

SEQ ID NO: 160110 - protein, 8 aa, Homo Sapiens
IFIARSQM

SEQ ID NO: 160111 - protein, 8 aa, Homo Sapiens
IFLGVSTV

SEQ ID NO: 160112 - protein, 8 aa, Homo Sapiens
IFQVAQEL

SEQ ID NO: 160113 - protein, 8 aa, Homo Sapiens
IYEVVRPL

SEQ ID NO: 160114 - protein, 8 aa, Homo Sapiens
IYFIHGLF

SEQ ID NO: 160115 - protein, 8 aa, Homo Sapiens
IYFLGNSL

SEQ ID NO: 160116 - protein, 8 aa, Homo Sapiens
IYHAVAAL

SEQ ID NO: 160117 - protein, 8 aa, Homo Sapiens
IYHISLEY

SEQ ID NO: 160118 - protein, 8 aa, Homo Sapiens
IYHVIMSV

SEQ ID NO: 160119 - protein, 8 aa, Homo Sapiens
IYIDRHVM

SEQ ID NO: 160120 - protein, 8 aa, Homo Sapiens
IYIVHDEV

SEQ ID NO: 160121 - protein, 8 aa, Homo Sapiens
IYLEGSAF

SEQ ID NO: 160122 - protein, 8 aa, Homo Sapiens
IYLNGESL

SEQ ID NO: 160123 - protein, 8 aa, Homo Sapiens
IYLNVESV

SEQ ID NO: 160124 - protein, 8 aa, Homo Sapiens
IYMESLAL

SEQ ID NO: 160125 - protein, 8 aa, Homo Sapiens
IYMIGVSL

SEQ ID NO: 160126 - protein, 8 aa, Homo Sapiens
IYMVHIQV

SEQ ID NO: 160127 - protein, 8 aa, Homo Sapiens
IYNIGTNF

SEQ ID NO: 160128 - protein, 8 aa, Homo Sapiens
IYNTAGFY

SEQ ID NO: 160129 - protein, 8 aa, Homo Sapiens
IYPLVGTM

SEQ ID NO: 160130 - protein, 8 aa, Homo Sapiens
IYQLQDVF

SEQ ID NO: 160131 - protein, 8 aa, Homo Sapiens
IYQSASVF

SEQ ID NO: 160132 - protein, 8 aa, Homo Sapiens
IYVNYPTF

SEQ ID NO: 160133 - protein, 8 aa, Homo Sapiens
KYLTAEAF

SEQ ID NO: 160134 - protein, 8 aa, Homo Sapiens
KYMNNITY

SEQ ID NO: 160135 - protein, 8 aa, Homo Sapiens
LFFVGNQL

SEQ ID NO: 160136 - protein, 8 aa, Homo Sapiens
LFLVGSSL

SEQ ID NO: 160137 - protein, 8 aa, Homo Sapiens
LFNLGSAY

SEQ ID NO: 160138 - protein, 8 aa, Homo Sapiens
LFQNGSVL

SEQ ID NO: 160139 - protein, 8 aa, Homo Sapiens
LFQNIRPL

SEQ ID NO: 160140 - protein, 8 aa, Homo Sapiens
LFQSRISL

SEQ ID NO: 160141 - protein, 8 aa, Homo Sapiens
LFTFRPAL

SEQ ID NO: 160142 - protein, 8 aa, Homo Sapiens
LYFTGEAI

SEQ ID NO: 160143 - protein, 8 aa, Homo Sapiens
LYHMERSL

SEQ ID NO: 160144 - protein, 8 aa, Homo Sapiens
LYITGAAL

SEQ ID NO: 160145 - protein, 8 aa, Homo Sapiens
LYLDGHVF

SEQ ID NO: 160146 - protein, 8 aa, Homo Sapiens
LYLIARVM

SEQ ID NO: 160147 - protein, 8 aa, Homo Sapiens
LYLLRLAL

SEQ ID NO: 160148 - protein, 8 aa, Homo Sapiens
LYLNRTSL

SEQ ID NO: 160149 - protein, 8 aa, Homo Sapiens
LYMVRTML

SEQ ID NO: 160150 - protein, 8 aa, Homo Sapiens
LYMVSKEL

SEQ ID NO: 160151 - protein, 8 aa, Homo Sapiens
LYNIAFMY

SEQ ID NO: 160152 - protein, 8 aa, Homo Sapiens
LYNIGLTY

SEQ ID NO: 160153 - protein, 8 aa, Homo Sapiens
LYNIGNVY

SEQ ID NO: 160154 - protein, 8 aa, Homo Sapiens
LYQTALHL

SEQ ID NO: 160155 - protein, 8 aa, Homo Sapiens
LYQTVTGL

SEQ ID NO: 160156 - protein, 8 aa, Homo Sapiens
LYQVGKEF

SEQ ID NO: 160157 - protein, 8 aa, Homo Sapiens
LYSTHAAL

SEQ ID NO: 160158 - protein, 8 aa, Homo Sapiens
MFLTRSEY

SEQ ID NO: 160159 - protein, 8 aa, Homo Sapiens
MFNNANVL

SEQ ID NO: 160160 - protein, 8 aa, Homo Sapiens
MYFIVRSL

SEQ ID NO: 160161 - protein, 8 aa, Homo Sapiens
MYTVAMAY

SEQ ID NO: 160162 - protein, 8 aa, Homo Sapiens
NFSIHMAL

SEQ ID NO: 160163 - protein, 8 aa, Homo Sapiens
NYHFGVTY

SEQ ID NO: 160164 - protein, 8 aa, Homo Sapiens
NYLTRIHY

SEQ ID NO: 160165 - protein, 8 aa, Homo Sapiens
NYLVVAAM

SEQ ID NO: 160166 - protein, 8 aa, Homo Sapiens
NYMMGIEF

SEQ ID NO: 160167 - protein, 8 aa, Homo Sapiens
NYYVRAVL

SEQ ID NO: 160168 - protein, 8 aa, Homo Sapiens
QFQFGHAL

SEQ ID NO: 160169 - protein, 8 aa, Homo Sapiens
QFRNAPPF

SEQ ID NO: 160170 - protein, 8 aa, Homo Sapiens
QYYVGQSF

SEQ ID NO: 160171 - protein, 8 aa, Homo Sapiens
RYMFSRPF

SEQ ID NO: 160172 - protein, 8 aa, Homo Sapiens
SFFLGKEL

SEQ ID NO: 160173 - protein, 8 aa, Homo Sapiens
SFLVNHDF

SEQ ID NO: 160174 - protein, 8 aa, Homo Sapiens
SFNTHFEM

SEQ ID NO: 160175 - protein, 8 aa, Homo Sapiens
SFNVALSL

SEQ ID NO: 160176 - protein, 8 aa, Homo Sapiens
SFYNGLSF

SEQ ID NO: 160177 - protein, 8 aa, Homo Sapiens
SYNISEVM

SEQ ID NO: 160178 - protein, 8 aa, Homo Sapiens
SYWNHREL

SEQ ID NO: 160179 - protein, 8 aa, Homo Sapiens
TFLNHPAL

SEQ ID NO: 160180 - protein, 8 aa, Homo Sapiens
TFMNRVEV

SEQ ID NO: 160181 - protein, 8 aa, Homo Sapiens
TFTNHMVF

SEQ ID NO: 160182 - protein, 8 aa, Homo Sapiens
TFVNHPQV

SEQ ID NO: 160183 - protein, 8 aa, Homo Sapiens
TYKEALEK

SEQ ID NO: 160184 - protein, 8 aa, Homo Sapiens
TYLTGDQF

SEQ ID NO: 160185 - protein, 8 aa, Homo Sapiens
TYLVAFAY

SEQ ID NO: 160186 - protein, 8 aa, Homo Sapiens
TYLVGNSL

SEQ ID NO: 160187 - protein, 8 aa, Homo Sapiens
TYSLGSAL

SEQ ID NO: 160188 - protein, 8 aa, Homo Sapiens
TYTTRIHL

SEQ ID NO: 160189 - protein, 8 aa, Homo Sapiens
VFFVAHSY

SEQ ID NO: 160190 - protein, 8 aa, Homo Sapiens
VFLAGIAL

SEQ ID NO: 160191 - protein, 8 aa, Homo Sapiens
VFLLGHSM

SEQ ID NO: 160192 - protein, 8 aa, Homo Sapiens
VFLLGVVY

SEQ ID NO: 160193 - protein, 8 aa, Homo Sapiens
VFLVVRAH

SEQ ID NO: 160194 - protein, 8 aa, Homo Sapiens
VFMTHLEF

SEQ ID NO: 160195 - protein, 8 aa, Homo Sapiens
VFRVGSVL

SEQ ID NO: 160196 - protein, 8 aa, Homo Sapiens
VFRVSSSL

SEQ ID NO: 160197 - protein, 8 aa, Homo Sapiens
VFSIGPVF

SEQ ID NO: 160198 - protein, 8 aa, Homo Sapiens
VFSLSSEF

SEQ ID NO: 160199 - protein, 8 aa, Homo Sapiens
VFTNAEVY

SEQ ID NO: 160200 - protein, 8 aa, Homo Sapiens
VFVTVKEL

SEQ ID NO: 160201 - protein, 8 aa, Homo Sapiens
VFVVGESY

SEQ ID NO: 160202 - protein, 8 aa, Homo Sapiens
VYEIGRQF

SEQ ID NO: 160203 - protein, 8 aa, Homo Sapiens
VYFVHPTF

SEQ ID NO: 160204 - protein, 8 aa, Homo Sapiens
VYHAVSVM

SEQ ID NO: 160205 - protein, 8 aa, Homo Sapiens
VYITRAQL

SEQ ID NO: 160206 - protein, 8 aa, Homo Sapiens
VYKVGIAF

SEQ ID NO: 160207 - protein, 8 aa, Homo Sapiens
VYLFTEAY

SEQ ID NO: 160208 - protein, 8 aa, Homo Sapiens
VYLNVMEL

SEQ ID NO: 160209 - protein, 8 aa, Homo Sapiens
VYLTGYNF

SEQ ID NO: 160210 - protein, 8 aa, Homo Sapiens
VYLTHLDY

SEQ ID NO: 160211 - protein, 8 aa, Homo Sapiens
VYLVHDEL

SEQ ID NO: 160212 - protein, 8 aa, Homo Sapiens
VYLVTEVY

SEQ ID NO: 160213 - protein, 8 aa, Homo Sapiens
VYMLAASL

SEQ ID NO: 160214 - protein, 8 aa, Homo Sapiens
VYMTGKEL

SEQ ID NO: 160215 - protein, 8 aa, Homo Sapiens
VYNIHLAV

SEQ ID NO: 160216 - protein, 8 aa, Homo Sapiens
VYQAVLSL

SEQ ID NO: 160217 - protein, 8 aa, Homo Sapiens
VYQAVQAL

SEQ ID NO: 160218 - protein, 8 aa, Homo Sapiens
VYQAVRQF

SEQ ID NO: 160219 - protein, 8 aa, Homo Sapiens
YFDEHYEY

SEQ ID NO: 160220 - protein, 8 aa, Homo Sapiens
YFFAVSTL

SEQ ID NO: 160221 - protein, 8 aa, Homo Sapiens
YFLEHLAF

SEQ ID NO: 160222 - protein, 8 aa, Homo Sapiens
YFLIGKVY

SEQ ID NO: 160223 - protein, 8 aa, Homo Sapiens
YFLQRHEL

SEQ ID NO: 160224 - protein, 8 aa, Homo Sapiens
YFMVGTAF

SEQ ID NO: 160225 - protein, 8 aa, Homo Sapiens
YFNEGTVL

SEQ ID NO: 160226 - protein, 8 aa, Homo Sapiens
YFSPFRPY

SEQ ID NO: 160227 - protein, 8 aa, Homo Sapiens
YQSKVREL

SEQ ID NO: 160228 - protein, 8 aa, Homo Sapiens
YSPHGHIL

SEQ ID NO: 160229 - protein, 8 aa, Homo Sapiens
YVHMVTHF

SEQ ID NO: 160230 - protein, 8 aa, Homo Sapiens
YWQNHPEL

SEQ ID NO: 160231 - protein, 8 aa, Homo Sapiens
YYASFLEV

SEQ ID NO: 160232 - protein, 8 aa, Homo Sapiens
YYEVHKEL

SEQ ID NO: 160233 - protein, 8 aa, Homo Sapiens
YYFAVDTM

SEQ ID NO: 160234 - protein, 8 aa, Homo Sapiens
YYFLGRML

SEQ ID NO: 160235 - protein, 8 aa, Homo Sapiens
YYFNQHIF

SEQ ID NO: 160236 - protein, 8 aa, Homo Sapiens
YYFSAHAL

SEQ ID NO: 160237 - protein, 8 aa, Homo Sapiens
YYFSVDNL

SEQ ID NO: 160238 - protein, 8 aa, Homo Sapiens
YYHWALSF

SEQ ID NO: 160239 - protein, 8 aa, Homo Sapiens
YYINHPLY

SEQ ID NO: 160240 - protein, 8 aa, Homo Sapiens
YYINSPEL

SEQ ID NO: 160241 - protein, 8 aa, Homo Sapiens
YYITRAKL

SEQ ID NO: 160242 - protein, 8 aa, Homo Sapiens
YYKPGLLM

SEQ ID NO: 160243 - protein, 8 aa, Homo Sapiens
YYNTAVKL

SEQ ID NO: 160244 - protein, 8 aa, Homo Sapiens
YYQFINEL

SEQ ID NO: 160245 - protein, 8 aa, Homo Sapiens
YYQLSEEL

SEQ ID NO: 160246 - protein, 8 aa, Homo Sapiens
YYTVAHAI

SEQ ID NO: 160247 - protein, 9 aa, Homo Sapiens
AFADYVSTM

SEQ ID NO: 160248 - protein, 9 aa, Homo Sapiens
AFALVSQAY

SEQ ID NO: 160249 - protein, 9 aa, Homo Sapiens
AFATPTISL

SEQ ID NO: 160250 - protein, 9 aa, Homo Sapiens
AFEDYVQSM

SEQ ID NO: 160251 - protein, 9 aa, Homo Sapiens
AFFGGSNPF

SEQ ID NO: 160252 - protein, 9 aa, Homo Sapiens
AFHLRVLAH

SEQ ID NO: 160253 - protein, 9 aa, Homo Sapiens
AFIAQALCL

SEQ ID NO: 160254 - protein, 9 aa, Homo Sapiens
AFIDQSQSL

SEQ ID NO: 160255 - protein, 9 aa, Homo Sapiens
AFIDTAQHM

SEQ ID NO: 160256 - protein, 9 aa, Homo Sapiens
AFIFRSLNL

SEQ ID NO: 160257 - protein, 9 aa, Homo Sapiens
AFIHISTAY

SEQ ID NO: 160258 - protein, 9 aa, Homo Sapiens
AFIITGQTY

SEQ ID NO: 160259 - protein, 9 aa, Homo Sapiens
AFIQEAAAF

SEQ ID NO: 160260 - protein, 9 aa, Homo Sapiens
AFISHTSVL

SEQ ID NO: 160261 - protein, 9 aa, Homo Sapiens
AFISKVSTH

SEQ ID NO: 160262 - protein, 9 aa, Homo Sapiens
AFISLAKTL

SEQ ID NO: 160263 - protein, 9 aa, Homo Sapiens
AFKEVGIEF

SEQ ID NO: 160264 - protein, 9 aa, Homo Sapiens
AFLAEASVM

SEQ ID NO: 160265 - protein, 9 aa, Homo Sapiens
AFLEAADNL

SEQ ID NO: 160266 - protein, 9 aa, Homo Sapiens
AFLEQAVSY

SEQ ID NO: 160267 - protein, 9 aa, Homo Sapiens
AFLGEANVM

SEQ ID NO: 160268 - protein, 9 aa, Homo Sapiens
AFLKTALEM

SEQ ID NO: 160269 - protein, 9 aa, Homo Sapiens
AFMDQVRAF

SEQ ID NO: 160270 - protein, 9 aa, Homo Sapiens
AFMEKVRVL

SEQ ID NO: 160271 - protein, 9 aa, Homo Sapiens
AFMSQVHSV

SEQ ID NO: 160272 - protein, 9 aa, Homo Sapiens
AFNFGSRPL

SEQ ID NO: 160273 - protein, 9 aa, Homo Sapiens
AFNTQVTAL

SEQ ID NO: 160274 - protein, 9 aa, Homo Sapiens
AFNVMGEQF

SEQ ID NO: 160275 - protein, 9 aa, Homo Sapiens
AFPDSVNSL

SEQ ID NO: 160276 - protein, 9 aa, Homo Sapiens
AFPGASLYL

SEQ ID NO: 160277 - protein, 9 aa, Homo Sapiens
AFPIGSSGF

SEQ ID NO: 160278 - protein, 9 aa, Homo Sapiens
AFPKAVSVF

SEQ ID NO: 160279 - protein, 9 aa, Homo Sapiens
AFPNLARVL

SEQ ID NO: 160280 - protein, 9 aa, Homo Sapiens
AFPYGNVAF

SEQ ID NO: 160281 - protein, 9 aa, Homo Sapiens
AFQAEIAQL

SEQ ID NO: 160282 - protein, 9 aa, Homo Sapiens
AFQERLNSY

SEQ ID NO: 160283 - protein, 9 aa, Homo Sapiens
AFQFSYTAV

SEQ ID NO: 160284 - protein, 9 aa, Homo Sapiens
AFQHVGKAF

SEQ ID NO: 160285 - protein, 9 aa, Homo Sapiens
AFQVLVKSL

SEQ ID NO: 160286 - protein, 9 aa, Homo Sapiens
AFQVSACAF

SEQ ID NO: 160287 - protein, 9 aa, Homo Sapiens
AFYDPTHAW

SEQ ID NO: 160288 - protein, 9 aa, Homo Sapiens
APYIYALLS

SEQ ID NO: 160289 - protein, 9 aa, Homo Sapiens
AVLASGATF

SEQ ID NO: 160290 - protein, 9 aa, Homo Sapiens
AVNIMHSSL

SEQ ID NO: 160291 - protein, 9 aa, Homo Sapiens
AWIDGVLDM

SEQ ID NO: 160292 - protein, 9 aa, Homo Sapiens
AYALAGVSF

SEQ ID NO: 160293 - protein, 9 aa, Homo Sapiens
AYALMAHAM

SEQ ID NO: 160294 - protein, 9 aa, Homo Sapiens
AYEFMSQAF

SEQ ID NO: 160295 - protein, 9 aa, Homo Sapiens
AYFPDARDM

SEQ ID NO: 160296 - protein, 9 aa, Homo Sapiens
AYFPYFITY

SEQ ID NO: 160297 - protein, 9 aa, Homo Sapiens
AYGRMGLAL

SEQ ID NO: 160298 - protein, 9 aa, Homo Sapiens
AYHAVVLSY

SEQ ID NO: 160299 - protein, 9 aa, Homo Sapiens
AYHELAQVY

SEQ ID NO: 160300 - protein, 9 aa, Homo Sapiens
AYHGLTVPL

SEQ ID NO: 160301 - protein, 9 aa, Homo Sapiens
AYIFNSNVM

SEQ ID NO: 160302 - protein, 9 aa, Homo Sapiens
AYIGGICSL

SEQ ID NO: 160303 - protein, 9 aa, Homo Sapiens
AYIMKRMDM

SEQ ID NO: 160304 - protein, 9 aa, Homo Sapiens
AYINKVEEL

SEQ ID NO: 160305 - protein, 9 aa, Homo Sapiens
AYINRASLL

SEQ ID NO: 160306 - protein, 9 aa, Homo Sapiens
AYKPPGFSL

SEQ ID NO: 160307 - protein, 9 aa, Homo Sapiens
AYLAALTQL

SEQ ID NO: 160308 - protein, 9 aa, Homo Sapiens
AYLALRISY

SEQ ID NO: 160309 - protein, 9 aa, Homo Sapiens
AYLEAHETF

SEQ ID NO: 160310 - protein, 9 aa, Homo Sapiens
AYLEALSHL

SEQ ID NO: 160311 - protein, 9 aa, Homo Sapiens
AYLGSAIQL

SEQ ID NO: 160312 - protein, 9 aa, Homo Sapiens
AYLIMISAL

SEQ ID NO: 160313 - protein, 9 aa, Homo Sapiens
AYLPNGAAL

SEQ ID NO: 160314 - protein, 9 aa, Homo Sapiens
AYLPVNESF

SEQ ID NO: 160315 - protein, 9 aa, Homo Sapiens
AYLRSMIPH

SEQ ID NO: 160316 - protein, 9 aa, Homo Sapiens
AYLSKAMEI

SEQ ID NO: 160317 - protein, 9 aa, Homo Sapiens
AYMAAFNSI

SEQ ID NO: 160318 - protein, 9 aa, Homo Sapiens
AYMELVNNM

SEQ ID NO: 160319 - protein, 9 aa, Homo Sapiens
AYMKSLLSL

SEQ ID NO: 160320 - protein, 9 aa, Homo Sapiens
AYMPHTFFI

SEQ ID NO: 160321 - protein, 9 aa, Homo Sapiens
AYNFPVTAM

SEQ ID NO: 160322 - protein, 9 aa, Homo Sapiens
AYNYYTKAI

SEQ ID NO: 160323 - protein, 9 aa, Homo Sapiens
AYPEIVAVY

SEQ ID NO: 160324 - protein, 9 aa, Homo Sapiens
AYPEYLITF

SEQ ID NO: 160325 - protein, 9 aa, Homo Sapiens
AYPEYLITY

SEQ ID NO: 160326 - protein, 9 aa, Homo Sapiens
AYPYNFSNL

SEQ ID NO: 160327 - protein, 9 aa, Homo Sapiens
AYPYYASAF

SEQ ID NO: 160328 - protein, 9 aa, Homo Sapiens
AYQDRLAYL

SEQ ID NO: 160329 - protein, 9 aa, Homo Sapiens
AYQEAVRTL

SEQ ID NO: 160330 - protein, 9 aa, Homo Sapiens
AYQFFREAL

SEQ ID NO: 160331 - protein, 9 aa, Homo Sapiens
AYQLMTDVF

SEQ ID NO: 160332 - protein, 9 aa, Homo Sapiens
AYQQRVTAL

SEQ ID NO: 160333 - protein, 9 aa, Homo Sapiens
AYQVSVCAF

SEQ ID NO: 160334 - protein, 9 aa, Homo Sapiens
AYQYTIRAH

SEQ ID NO: 160335 - protein, 9 aa, Homo Sapiens
AYSIVAGVF

SEQ ID NO: 160336 - protein, 9 aa, Homo Sapiens
AYTPFHAVL

SEQ ID NO: 160337 - protein, 9 aa, Homo Sapiens
AYVHMVTHF

SEQ ID NO: 160338 - protein, 9 aa, Homo Sapiens
AYVPGFAHI

SEQ ID NO: 160339 - protein, 9 aa, Homo Sapiens
AYYERALQL

SEQ ID NO: 160340 - protein, 9 aa, Homo Sapiens
AYYKKALEL

SEQ ID NO: 160341 - protein, 9 aa, Homo Sapiens
AYYPSSFPK

SEQ ID NO: 160342 - protein, 9 aa, Homo Sapiens
AYYVSNEEL

SEQ ID NO: 160343 - protein, 9 aa, Homo Sapiens
AYYYRKFFY

SEQ ID NO: 160344 - protein, 9 aa, Homo Sapiens
AYYYSLQIY

SEQ ID NO: 160345 - protein, 9 aa, Homo Sapiens
CFFPNGNAF

SEQ ID NO: 160346 - protein, 9 aa, Homo Sapiens
CFFTAKTTF

SEQ ID NO: 160347 - protein, 9 aa, Homo Sapiens
CFNPMKSVL

SEQ ID NO: 160348 - protein, 9 aa, Homo Sapiens
CFYGFQIAM

SEQ ID NO: 160349 - protein, 9 aa, Homo Sapiens
CYNLETNSL

SEQ ID NO: 160350 - protein, 9 aa, Homo Sapiens
CYQEFAAQL

SEQ ID NO: 160351 - protein, 9 aa, Homo Sapiens
CYQEGLRSL

SEQ ID NO: 160352 - protein, 9 aa, Homo Sapiens
EWPPFVVTL

SEQ ID NO: 160353 - protein, 9 aa, Homo Sapiens
FALNTKTSY

SEQ ID NO: 160354 - protein, 9 aa, Homo Sapiens
FFDEKLNSL

SEQ ID NO: 160355 - protein, 9 aa, Homo Sapiens
FFEFLTKEL

SEQ ID NO: 160356 - protein, 9 aa, Homo Sapiens
FFFAPASSY

SEQ ID NO: 160357 - protein, 9 aa, Homo Sapiens
FFFDKTEEL

SEQ ID NO: 160358 - protein, 9 aa, Homo Sapiens
FFFTARTSF

SEQ ID NO: 160359 - protein, 9 aa, Homo Sapiens
FFGTHETAF

SEQ ID NO: 160360 - protein, 9 aa, Homo Sapiens
FFHEYLVSV

SEQ ID NO: 160361 - protein, 9 aa, Homo Sapiens
FFHLVNSEM

SEQ ID NO: 160362 - protein, 9 aa, Homo Sapiens
FFHWVNNVL

SEQ ID NO: 160363 - protein, 9 aa, Homo Sapiens
FFHYAVDNL

SEQ ID NO: 160364 - protein, 9 aa, Homo Sapiens
FFIACVTSF

SEQ ID NO: 160365 - protein, 9 aa, Homo Sapiens
FFIAGRYEF

SEQ ID NO: 160366 - protein, 9 aa, Homo Sapiens
FFIDCMAAL

SEQ ID NO: 160367 - protein, 9 aa, Homo Sapiens
FFIDQANYF

SEQ ID NO: 160368 - protein, 9 aa, Homo Sapiens
FFINEAMEL

SEQ ID NO: 160369 - protein, 9 aa, Homo Sapiens
FFKERVMEI

SEQ ID NO: 160370 - protein, 9 aa, Homo Sapiens
FFKLPGGEL

SEQ ID NO: 160371 - protein, 9 aa, Homo Sapiens
FFLARPTTF

SEQ ID NO: 160372 - protein, 9 aa, Homo Sapiens
FFLIVKTLY

SEQ ID NO: 160373 - protein, 9 aa, Homo Sapiens
FFLQKRLQL

SEQ ID NO: 160374 - protein, 9 aa, Homo Sapiens
FFLRMKCTL

SEQ ID NO: 160375 - protein, 9 aa, Homo Sapiens
FFLSHQTAL

SEQ ID NO: 160376 - protein, 9 aa, Homo Sapiens
FFLSKIRSH

SEQ ID NO: 160377 - protein, 9 aa, Homo Sapiens
FFLVQTKEV

SEQ ID NO: 160378 - protein, 9 aa, Homo Sapiens
FFMEKRAKY

SEQ ID NO: 160379 - protein, 9 aa, Homo Sapiens
FFMERSWSV

SEQ ID NO: 160380 - protein, 9 aa, Homo Sapiens
FFMLRSLSL

SEQ ID NO: 160381 - protein, 9 aa, Homo Sapiens
FFMPGFAPL

SEQ ID NO: 160382 - protein, 9 aa, Homo Sapiens
FFNDTTTAF

SEQ ID NO: 160383 - protein, 9 aa, Homo Sapiens
FFNGLRTEL

SEQ ID NO: 160384 - protein, 9 aa, Homo Sapiens
FFNSVRSVF

SEQ ID NO: 160385 - protein, 9 aa, Homo Sapiens
FFPALHESL

SEQ ID NO: 160386 - protein, 9 aa, Homo Sapiens
FFPEYTHQL

SEQ ID NO: 160387 - protein, 9 aa, Homo Sapiens
FFPFDTRQM

SEQ ID NO: 160388 - protein, 9 aa, Homo Sapiens
FFPFNPLDF

SEQ ID NO: 160389 - protein, 9 aa, Homo Sapiens
FFPGFPLAL

SEQ ID NO: 160390 - protein, 9 aa, Homo Sapiens
FFPIAGLEF

SEQ ID NO: 160391 - protein, 9 aa, Homo Sapiens
FFPKKLLEL

SEQ ID NO: 160392 - protein, 9 aa, Homo Sapiens
FFPLHPMMI

SEQ ID NO: 160393 - protein, 9 aa, Homo Sapiens
FFPMHFQAF

SEQ ID NO: 160394 - protein, 9 aa, Homo Sapiens
FFPPFVSCI

SEQ ID NO: 160395 - protein, 9 aa, Homo Sapiens
FFPSNVEQF

SEQ ID NO: 160396 - protein, 9 aa, Homo Sapiens
FFPVHFQEF

SEQ ID NO: 160397 - protein, 9 aa, Homo Sapiens
FFPWNSHVV

SEQ ID NO: 160398 - protein, 9 aa, Homo Sapiens
FFPYQVTER

SEQ ID NO: 160399 - protein, 9 aa, Homo Sapiens
FFQDKARFY

SEQ ID NO: 160400 - protein, 9 aa, Homo Sapiens
FFQETNIPY

SEQ ID NO: 160401 - protein, 9 aa, Homo Sapiens
FFQFGGQSL

SEQ ID NO: 160402 - protein, 9 aa, Homo Sapiens
FFQQTTTSF

SEQ ID NO: 160403 - protein, 9 aa, Homo Sapiens
FFSEREASF

SEQ ID NO: 160404 - protein, 9 aa, Homo Sapiens
FFTDNVPAL

SEQ ID NO: 160405 - protein, 9 aa, Homo Sapiens
FFTSKALNM

SEQ ID NO: 160406 - protein, 9 aa, Homo Sapiens
FFVENVSEL

SEQ ID NO: 160407 - protein, 9 aa, Homo Sapiens
FFYPGWKVL

SEQ ID NO: 160408 - protein, 9 aa, Homo Sapiens
FFYPLDFTF

SEQ ID NO: 160409 - protein, 9 aa, Homo Sapiens
FFYQRLVEF

SEQ ID NO: 160410 - protein, 9 aa, Homo Sapiens
FFYTHLINF

SEQ ID NO: 160411 - protein, 9 aa, Homo Sapiens
FLPKGYLAL

SEQ ID NO: 160412 - protein, 9 aa, Homo Sapiens
FLYPFPLAL

SEQ ID NO: 160413 - protein, 9 aa, Homo Sapiens
FMHVQLEVM

SEQ ID NO: 160414 - protein, 9 aa, Homo Sapiens
FSPFHASVL

SEQ ID NO: 160415 - protein, 9 aa, Homo Sapiens
FTFPSDITE

SEQ ID NO: 160416 - protein, 9 aa, Homo Sapiens
FTIFRTISV

SEQ ID NO: 160417 - protein, 9 aa, Homo Sapiens
FVYITDNAY

SEQ ID NO: 160418 - protein, 9 aa, Homo Sapiens
FWPEAFSEV

SEQ ID NO: 160419 - protein, 9 aa, Homo Sapiens
FWPPYVELL

SEQ ID NO: 160420 - protein, 9 aa, Homo Sapiens
FYAHSLVEL

SEQ ID NO: 160421 - protein, 9 aa, Homo Sapiens
FYAKGALQY

SEQ ID NO: 160422 - protein, 9 aa, Homo Sapiens
FYEDNVLYM

SEQ ID NO: 160423 - protein, 9 aa, Homo Sapiens
FYEETKVKF

SEQ ID NO: 160424 - protein, 9 aa, Homo Sapiens
FYEGHITSL

SEQ ID NO: 160425 - protein, 9 aa, Homo Sapiens
FYEPYSREL

SEQ ID NO: 160426 - protein, 9 aa, Homo Sapiens
FYFALRDTL

SEQ ID NO: 160427 - protein, 9 aa, Homo Sapiens
FYFASKLVL

SEQ ID NO: 160428 - protein, 9 aa, Homo Sapiens
FYGDLRKAL

SEQ ID NO: 160429 - protein, 9 aa, Homo Sapiens
FYHAYDSYL

SEQ ID NO: 160430 - protein, 9 aa, Homo Sapiens
FYHKGIASL

SEQ ID NO: 160431 - protein, 9 aa, Homo Sapiens
FYHLRIAYY

SEQ ID NO: 160432 - protein, 9 aa, Homo Sapiens
FYHPETTQL

SEQ ID NO: 160433 - protein, 9 aa, Homo Sapiens
FYIENQKEY

SEQ ID NO: 160434 - protein, 9 aa, Homo Sapiens
FYIESISYL

SEQ ID NO: 160435 - protein, 9 aa, Homo Sapiens
FYIHEVQEL

SEQ ID NO: 160436 - protein, 9 aa, Homo Sapiens
FYIIEREPL

SEQ ID NO: 160437 - protein, 9 aa, Homo Sapiens
FYILTSKEL

SEQ ID NO: 160438 - protein, 9 aa, Homo Sapiens
FYIPQRPYM

SEQ ID NO: 160439 - protein, 9 aa, Homo Sapiens
FYISPRITF

SEQ ID NO: 160440 - protein, 9 aa, Homo Sapiens
FYISWAEEY

SEQ ID NO: 160441 - protein, 9 aa, Homo Sapiens
FYITPSTSL

SEQ ID NO: 160442 - protein, 9 aa, Homo Sapiens
FYITSRTQF

SEQ ID NO: 160443 - protein, 9 aa, Homo Sapiens
FYIYGVSDL

SEQ ID NO: 160444 - protein, 9 aa, Homo Sapiens
FYLDNVIGH

SEQ ID NO: 160445 - protein, 9 aa, Homo Sapiens
FYLDTVSAL

SEQ ID NO: 160446 - protein, 9 aa, Homo Sapiens
FYLFHPLAY

SEQ ID NO: 160447 - protein, 9 aa, Homo Sapiens
FYLFHVQEV

SEQ ID NO: 160448 - protein, 9 aa, Homo Sapiens
FYLNQSTAY

SEQ ID NO: 160449 - protein, 9 aa, Homo Sapiens
FYLPHGLSI

SEQ ID NO: 160450 - protein, 9 aa, Homo Sapiens
FYLPHVCSY

SEQ ID NO: 160451 - protein, 9 aa, Homo Sapiens
FYLPIAAAM

SEQ ID NO: 160452 - protein, 9 aa, Homo Sapiens
FYLSKMISM

SEQ ID NO: 160453 - protein, 9 aa, Homo Sapiens
FYLVPACSY

SEQ ID NO: 160454 - protein, 9 aa, Homo Sapiens
FYMDTSHLF

SEQ ID NO: 160455 - protein, 9 aa, Homo Sapiens
FYMVRAQAW

SEQ ID NO: 160456 - protein, 9 aa, Homo Sapiens
FYNEYVREL

SEQ ID NO: 160457 - protein, 9 aa, Homo Sapiens
FYNGPVSKF

SEQ ID NO: 160458 - protein, 9 aa, Homo Sapiens
FYNLIHPEY

SEQ ID NO: 160459 - protein, 9 aa, Homo Sapiens
FYNLSIQSF

SEQ ID NO: 160460 - protein, 9 aa, Homo Sapiens
FYNNRLQAY

SEQ ID NO: 160461 - protein, 9 aa, Homo Sapiens
FYNQVSTPL

SEQ ID NO: 160462 - protein, 9 aa, Homo Sapiens
FYNTSIEEM

SEQ ID NO: 160463 - protein, 9 aa, Homo Sapiens
FYPAKVTAV

SEQ ID NO: 160464 - protein, 9 aa, Homo Sapiens
FYPDLGPEL

SEQ ID NO: 160465 - protein, 9 aa, Homo Sapiens
FYPEEISSM

SEQ ID NO: 160466 - protein, 9 aa, Homo Sapiens
FYPEEVSSM

SEQ ID NO: 160467 - protein, 9 aa, Homo Sapiens
FYPELKLAY

SEQ ID NO: 160468 - protein, 9 aa, Homo Sapiens
FYPFAGHDL

SEQ ID NO: 160469 - protein, 9 aa, Homo Sapiens
FYPGLGLAL

SEQ ID NO: 160470 - protein, 9 aa, Homo Sapiens
FYPHHPQML

SEQ ID NO: 160471 - protein, 9 aa, Homo Sapiens
FYPIYFRPL

SEQ ID NO: 160472 - protein, 9 aa, Homo Sapiens
FYPPDPAQL

SEQ ID NO: 160473 - protein, 9 aa, Homo Sapiens
FYPPKVELF

SEQ ID NO: 160474 - protein, 9 aa, Homo Sapiens
FYPPLTSSL

SEQ ID NO: 160475 - protein, 9 aa, Homo Sapiens
FYPPPRITL

SEQ ID NO: 160476 - protein, 9 aa, Homo Sapiens
FYPSGGLEV

SEQ ID NO: 160477 - protein, 9 aa, Homo Sapiens
FYPYGLQTF

SEQ ID NO: 160478 - protein, 9 aa, Homo Sapiens
FYQDKLKSL

SEQ ID NO: 160479 - protein, 9 aa, Homo Sapiens
FYQGHVEGY

SEQ ID NO: 160480 - protein, 9 aa, Homo Sapiens
FYQHNVEKL

SEQ ID NO: 160481 - protein, 9 aa, Homo Sapiens
FYQPKIQQF

SEQ ID NO: 160482 - protein, 9 aa, Homo Sapiens
FYQPTCIVL

SEQ ID NO: 160483 - protein, 9 aa, Homo Sapiens
FYQRFPLSF

SEQ ID NO: 160484 - protein, 9 aa, Homo Sapiens
FYRPLAPEL

SEQ ID NO: 160485 - protein, 9 aa, Homo Sapiens
FYTVAVTSL

SEQ ID NO: 160486 - protein, 9 aa, Homo Sapiens
FYVDTVRAF

SEQ ID NO: 160487 - protein, 9 aa, Homo Sapiens
FYVPFAKAL

SEQ ID NO: 160488 - protein, 9 aa, Homo Sapiens
FYVRLIDSM

SEQ ID NO: 160489 - protein, 9 aa, Homo Sapiens
FYYGGQVNY

SEQ ID NO: 160490 - protein, 9 aa, Homo Sapiens
FYYIRISEL

SEQ ID NO: 160491 - protein, 9 aa, Homo Sapiens
GFMPGAHVF

SEQ ID NO: 160492 - protein, 9 aa, Homo Sapiens
GFPEAASSF

SEQ ID NO: 160493 - protein, 9 aa, Homo Sapiens
GFPEQATAF

SEQ ID NO: 160494 - protein, 9 aa, Homo Sapiens
GFPSSVAAL

SEQ ID NO: 160495 - protein, 9 aa, Homo Sapiens
GYAPYVNRI

SEQ ID NO: 160496 - protein, 9 aa, Homo Sapiens
GYLAASQSF

SEQ ID NO: 160497 - protein, 9 aa, Homo Sapiens
GYLPLAHVL

SEQ ID NO: 160498 - protein, 9 aa, Homo Sapiens
GYMVMGDSF

SEQ ID NO: 160499 - protein, 9 aa, Homo Sapiens
GYPEVALHF

SEQ ID NO: 160500 - protein, 9 aa, Homo Sapiens
GYVLYASAM

SEQ ID NO: 160501 - protein, 9 aa, Homo Sapiens
GYYSHALYL

SEQ ID NO: 160502 - protein, 9 aa, Homo Sapiens
HFIEKAHTL

SEQ ID NO: 160503 - protein, 9 aa, Homo Sapiens
HFIFFVQEF

SEQ ID NO: 160504 - protein, 9 aa, Homo Sapiens
HFIRPGNAL

SEQ ID NO: 160505 - protein, 9 aa, Homo Sapiens
HFITPVSTL

SEQ ID NO: 160506 - protein, 9 aa, Homo Sapiens
HFLEVAREL

SEQ ID NO: 160507 - protein, 9 aa, Homo Sapiens
HFLQQPRPL

SEQ ID NO: 160508 - protein, 9 aa, Homo Sapiens
HFNPTGSAF

SEQ ID NO: 160509 - protein, 9 aa, Homo Sapiens
HFNVTNTTF

SEQ ID NO: 160510 - protein, 9 aa, Homo Sapiens
HFPDLFHVM

SEQ ID NO: 160511 - protein, 9 aa, Homo Sapiens
HFPGLASEL

SEQ ID NO: 160512 - protein, 9 aa, Homo Sapiens
HFPMQSREF

SEQ ID NO: 160513 - protein, 9 aa, Homo Sapiens
HFQEKVESL

SEQ ID NO: 160514 - protein, 9 aa, Homo Sapiens
HFYGKAIEL

SEQ ID NO: 160515 - protein, 9 aa, Homo Sapiens
HFYLKALSL

SEQ ID NO: 160516 - protein, 9 aa, Homo Sapiens
HFYRSLVAH

SEQ ID NO: 160517 - protein, 9 aa, Homo Sapiens
HYFFAVSTL

SEQ ID NO: 160518 - protein, 9 aa, Homo Sapiens
HYIDRVRAL

SEQ ID NO: 160519 - protein, 9 aa, Homo Sapiens
HYIIAARAL

SEQ ID NO: 160520 - protein, 9 aa, Homo Sapiens
HYINEVLFL

SEQ ID NO: 160521 - protein, 9 aa, Homo Sapiens
HYITPMMEL

SEQ ID NO: 160522 - protein, 9 aa, Homo Sapiens
HYMSINDSF

SEQ ID NO: 160523 - protein, 9 aa, Homo Sapiens
HYNNIMALY

SEQ ID NO: 160524 - protein, 9 aa, Homo Sapiens
HYPDFHQEL

SEQ ID NO: 160525 - protein, 9 aa, Homo Sapiens
HYPNWFKAL

SEQ ID NO: 160526 - protein, 9 aa, Homo Sapiens
HYQAIVTAY

SEQ ID NO: 160527 - protein, 9 aa, Homo Sapiens
HYQPVDVSL

SEQ ID NO: 160528 - protein, 9 aa, Homo Sapiens
HYYDLALAF

SEQ ID NO: 160529 - protein, 9 aa, Homo Sapiens
HYYGPALEF

SEQ ID NO: 160530 - protein, 9 aa, Homo Sapiens
HYYQKALEL

SEQ ID NO: 160531 - protein, 9 aa, Homo Sapiens
HYYSITINY

SEQ ID NO: 160532 - protein, 9 aa, Homo Sapiens
IDKTMLASL

SEQ ID NO: 160533 - protein, 9 aa, Homo Sapiens
IFEGGATEL

SEQ ID NO: 160534 - protein, 9 aa, Homo Sapiens
IFFPGVSEF

SEQ ID NO: 160535 - protein, 9 aa, Homo Sapiens
IFIDEIDSF

SEQ ID NO: 160536 - protein, 9 aa, Homo Sapiens
IFIDEIDSI

SEQ ID NO: 160537 - protein, 9 aa, Homo Sapiens
IFIDEVDSL

SEQ ID NO: 160538 - protein, 9 aa, Homo Sapiens
IFIKDSNSL

SEQ ID NO: 160539 - protein, 9 aa, Homo Sapiens
IFIPKTEEM

SEQ ID NO: 160540 - protein, 9 aa, Homo Sapiens
IFIPSSIAF

SEQ ID NO: 160541 - protein, 9 aa, Homo Sapiens
IFMDEIDSI

SEQ ID NO: 160542 - protein, 9 aa, Homo Sapiens
IFMENRNEF

SEQ ID NO: 160543 - protein, 9 aa, Homo Sapiens
IFNTVNTSL

SEQ ID NO: 160544 - protein, 9 aa, Homo Sapiens
IFNVAGYSH

SEQ ID NO: 160545 - protein, 9 aa, Homo Sapiens
IFPAKTITY

SEQ ID NO: 160546 - protein, 9 aa, Homo Sapiens
IFPDRATLY

SEQ ID NO: 160547 - protein, 9 aa, Homo Sapiens
IFPECPHVY

SEQ ID NO: 160548 - protein, 9 aa, Homo Sapiens
IFPEFLKEL

SEQ ID NO: 160549 - protein, 9 aa, Homo Sapiens
IFPEGFVEL

SEQ ID NO: 160550 - protein, 9 aa, Homo Sapiens
IFPLIYSEM

SEQ ID NO: 160551 - protein, 9 aa, Homo Sapiens
IFPNQTEEL

SEQ ID NO: 160552 - protein, 9 aa, Homo Sapiens
IFPPSGMEY

SEQ ID NO: 160553 - protein, 9 aa, Homo Sapiens
IFPSSISAM

SEQ ID NO: 160554 - protein, 9 aa, Homo Sapiens
IFPTLTSPL

SEQ ID NO: 160555 - protein, 9 aa, Homo Sapiens
IFQDPRSWF

SEQ ID NO: 160556 - protein, 9 aa, Homo Sapiens
IFQGNVHNF

SEQ ID NO: 160557 - protein, 9 aa, Homo Sapiens
IFQIGVLGF

SEQ ID NO: 160558 - protein, 9 aa, Homo Sapiens
IFQIHTSRM

SEQ ID NO: 160559 - protein, 9 aa, Homo Sapiens
IFQNIKQEY

SEQ ID NO: 160560 - protein, 9 aa, Homo Sapiens
IFQPHVRHL

SEQ ID NO: 160561 - protein, 9 aa, Homo Sapiens
IFQTAKETL

SEQ ID NO: 160562 - protein, 9 aa, Homo Sapiens
IFQTGLVAY

SEQ ID NO: 160563 - protein, 9 aa, Homo Sapiens
IFSIREVSF

SEQ ID NO: 160564 - protein, 9 aa, Homo Sapiens
IFVVASSSY

SEQ ID NO: 160565 - protein, 9 aa, Homo Sapiens
IFYDRAEYL

SEQ ID NO: 160566 - protein, 9 aa, Homo Sapiens
IWPEKVLDI

SEQ ID NO: 160567 - protein, 9 aa, Homo Sapiens
IWPLYLRFL

SEQ ID NO: 160568 - protein, 9 aa, Homo Sapiens
IWVDYINFL

SEQ ID NO: 160569 - protein, 9 aa, Homo Sapiens
IYADYARSL

SEQ ID NO: 160570 - protein, 9 aa, Homo Sapiens
IYAVNGIAF

SEQ ID NO: 160571 - protein, 9 aa, Homo Sapiens
IYELMQTEF

SEQ ID NO: 160572 - protein, 9 aa, Homo Sapiens
IYFDSSATY

SEQ ID NO: 160573 - protein, 9 aa, Homo Sapiens
IYFEYSHAF

SEQ ID NO: 160574 - protein, 9 aa, Homo Sapiens
IYFTRIIAF

SEQ ID NO: 160575 - protein, 9 aa, Homo Sapiens
IYHNGVLEF

SEQ ID NO: 160576 - protein, 9 aa, Homo Sapiens
IYIDGVQEV

SEQ ID NO: 160577 - protein, 9 aa, Homo Sapiens
IYIDRGVVF

SEQ ID NO: 160578 - protein, 9 aa, Homo Sapiens
IYIINVHSM

SEQ ID NO: 160579 - protein, 9 aa, Homo Sapiens
IYLDSVMCL

SEQ ID NO: 160580 - protein, 9 aa, Homo Sapiens
IYLEGKIDY

SEQ ID NO: 160581 - protein, 9 aa, Homo Sapiens
IYLIGHVAA

SEQ ID NO: 160582 - protein, 9 aa, Homo Sapiens
IYLIKGSAL

SEQ ID NO: 160583 - protein, 9 aa, Homo Sapiens
IYLNHIEPL

SEQ ID NO: 160584 - protein, 9 aa, Homo Sapiens
IYLPAAQTM

SEQ ID NO: 160585 - protein, 9 aa, Homo Sapiens
IYMDSGMSL

SEQ ID NO: 160586 - protein, 9 aa, Homo Sapiens
IYMDTLNIF

SEQ ID NO: 160587 - protein, 9 aa, Homo Sapiens
IYMGHVKGY

SEQ ID NO: 160588 - protein, 9 aa, Homo Sapiens
IYMQKVIYY

SEQ ID NO: 160589 - protein, 9 aa, Homo Sapiens
IYPDSFTVL

SEQ ID NO: 160590 - protein, 9 aa, Homo Sapiens
IYPEAVTMF

SEQ ID NO: 160591 - protein, 9 aa, Homo Sapiens
IYPETAAIL

SEQ ID NO: 160592 - protein, 9 aa, Homo Sapiens
IYPEVVHMF

SEQ ID NO: 160593 - protein, 9 aa, Homo Sapiens
IYPPEVAEF

SEQ ID NO: 160594 - protein, 9 aa, Homo Sapiens
IYPVNAISF

SEQ ID NO: 160595 - protein, 9 aa, Homo Sapiens
IYPYAAISY

SEQ ID NO: 160596 - protein, 9 aa, Homo Sapiens
IYQEKVLDL

SEQ ID NO: 160597 - protein, 9 aa, Homo Sapiens
IYQIHKEYL

SEQ ID NO: 160598 - protein, 9 aa, Homo Sapiens
IYQQIIQTY

SEQ ID NO: 160599 - protein, 9 aa, Homo Sapiens
IYQSKVREL

SEQ ID NO: 160600 - protein, 9 aa, Homo Sapiens
IYQSMPRML

SEQ ID NO: 160601 - protein, 9 aa, Homo Sapiens
IYQYMEEIY

SEQ ID NO: 160602 - protein, 9 aa, Homo Sapiens
IYQYVLNSM

SEQ ID NO: 160603 - protein, 9 aa, Homo Sapiens
IYSFHTLSF

SEQ ID NO: 160604 - protein, 9 aa, Homo Sapiens
IYVISAETF

SEQ ID NO: 160605 - protein, 9 aa, Homo Sapiens
IYVTGGYSY

SEQ ID NO: 160606 - protein, 9 aa, Homo Sapiens
IYWDGPLAL

SEQ ID NO: 160607 - protein, 9 aa, Homo Sapiens
IYYFAAVAH

SEQ ID NO: 160608 - protein, 9 aa, Homo Sapiens
IYYFKANVF

SEQ ID NO: 160609 - protein, 9 aa, Homo Sapiens
IYYQSPLSL

SEQ ID NO: 160610 - protein, 9 aa, Homo Sapiens
KFIDKQLEL

SEQ ID NO: 160611 - protein, 9 aa, Homo Sapiens
KFIDTTSKF

SEQ ID NO: 160612 - protein, 9 aa, Homo Sapiens
KFKEVGEAF

SEQ ID NO: 160613 - protein, 9 aa, Homo Sapiens
KFLAAGTHL

SEQ ID NO: 160614 - protein, 9 aa, Homo Sapiens
KFLASDVVF

SEQ ID NO: 160615 - protein, 9 aa, Homo Sapiens
KFLPDAQAL

SEQ ID NO: 160616 - protein, 9 aa, Homo Sapiens
KFLVAVESM

SEQ ID NO: 160617 - protein, 9 aa, Homo Sapiens
KFPAYERVL

SEQ ID NO: 160618 - protein, 9 aa, Homo Sapiens
KFPDSVEEL

SEQ ID NO: 160619 - protein, 9 aa, Homo Sapiens
KFPEIVAPL

SEQ ID NO: 160620 - protein, 9 aa, Homo Sapiens
KFPTSRLEM

SEQ ID NO: 160621 - protein, 9 aa, Homo Sapiens
KFQAMDISL

SEQ ID NO: 160622 - protein, 9 aa, Homo Sapiens
KFYATLVRY

SEQ ID NO: 160623 - protein, 9 aa, Homo Sapiens
KFYNAGLAY

SEQ ID NO: 160624 - protein, 9 aa, Homo Sapiens
KFYSVNVDY

SEQ ID NO: 160625 - protein, 9 aa, Homo Sapiens
KFYYSKIEY

SEQ ID NO: 160626 - protein, 9 aa, Homo Sapiens
KYAVQLVEM

SEQ ID NO: 160627 - protein, 9 aa, Homo Sapiens
KYFGRSLEL

SEQ ID NO: 160628 - protein, 9 aa, Homo Sapiens
KYIDFTSDY

SEQ ID NO: 160629 - protein, 9 aa, Homo Sapiens
KYIEGVSDF

SEQ ID NO: 160630 - protein, 9 aa, Homo Sapiens
KYIHSANVL

SEQ ID NO: 160631 - protein, 9 aa, Homo Sapiens
KYLALRIAL

SEQ ID NO: 160632 - protein, 9 aa, Homo Sapiens
KYLAVRLAL

SEQ ID NO: 160633 - protein, 9 aa, Homo Sapiens
KYLTSNVAY

SEQ ID NO: 160634 - protein, 9 aa, Homo Sapiens
KYMNNITYY

SEQ ID NO: 160635 - protein, 9 aa, Homo Sapiens
KYMYFTVVM

SEQ ID NO: 160636 - protein, 9 aa, Homo Sapiens
KYNIMLVRL

SEQ ID NO: 160637 - protein, 9 aa, Homo Sapiens
KYPASSSVF

SEQ ID NO: 160638 - protein, 9 aa, Homo Sapiens
KYPDYEVTW

SEQ ID NO: 160639 - protein, 9 aa, Homo Sapiens
KYPNFDVEY

SEQ ID NO: 160640 - protein, 9 aa, Homo Sapiens
KYQAQDNFM

SEQ ID NO: 160641 - protein, 9 aa, Homo Sapiens
KYQAVTATL

SEQ ID NO: 160642 - protein, 9 aa, Homo Sapiens
KYQEVTNNL

SEQ ID NO: 160643 - protein, 9 aa, Homo Sapiens
KYQIQQVDM

SEQ ID NO: 160644 - protein, 9 aa, Homo Sapiens
KYYFILSPY

SEQ ID NO: 160645 - protein, 9 aa, Homo Sapiens
LFAPYGTVM

SEQ ID NO: 160646 - protein, 9 aa, Homo Sapiens
LFEGRRIEF

SEQ ID NO: 160647 - protein, 9 aa, Homo Sapiens
LFFDSKQSL

SEQ ID NO: 160648 - protein, 9 aa, Homo Sapiens
LFHEVVQAF

SEQ ID NO: 160649 - protein, 9 aa, Homo Sapiens
LFHNAVSAY

SEQ ID NO: 160650 - protein, 9 aa, Homo Sapiens
LFHTIGVEF

SEQ ID NO: 160651 - protein, 9 aa, Homo Sapiens
LFIEHSVEV

SEQ ID NO: 160652 - protein, 9 aa, Homo Sapiens
LFIFSVANM

SEQ ID NO: 160653 - protein, 9 aa, Homo Sapiens
LFIPRETTY

SEQ ID NO: 160654 - protein, 9 aa, Homo Sapiens
LFIPRRAPF

SEQ ID NO: 160655 - protein, 9 aa, Homo Sapiens
LFLEKAMQL

SEQ ID NO: 160656 - protein, 9 aa, Homo Sapiens
LFLPTAAAY

SEQ ID NO: 160657 - protein, 9 aa, Homo Sapiens
LFMPRSTEF

SEQ ID NO: 160658 - protein, 9 aa, Homo Sapiens
LFMPSTSSM

SEQ ID NO: 160659 - protein, 9 aa, Homo Sapiens
LFMSSFQSY

SEQ ID NO: 160660 - protein, 9 aa, Homo Sapiens
LFPDTPLAL

SEQ ID NO: 160661 - protein, 9 aa, Homo Sapiens
LFPDVVNCM

SEQ ID NO: 160662 - protein, 9 aa, Homo Sapiens
LFPGKVHSL

SEQ ID NO: 160663 - protein, 9 aa, Homo Sapiens
LFPGPSKPF

SEQ ID NO: 160664 - protein, 9 aa, Homo Sapiens
LFQDKASEL

SEQ ID NO: 160665 - protein, 9 aa, Homo Sapiens
LFQHICTAY

SEQ ID NO: 160666 - protein, 9 aa, Homo Sapiens
LFYFSNEKY

SEQ ID NO: 160667 - protein, 9 aa, Homo Sapiens
LLPHYPNWF

SEQ ID NO: 160668 - protein, 9 aa, Homo Sapiens
LPINGNGKQ

SEQ ID NO: 160669 - protein, 9 aa, Homo Sapiens
LSWNKTVEL

SEQ ID NO: 160670 - protein, 9 aa, Homo Sapiens
LTTKRFLEL

SEQ ID NO: 160671 - protein, 9 aa, Homo Sapiens
LYAIRTQEY

SEQ ID NO: 160672 - protein, 9 aa, Homo Sapiens
LYFENAMRF

SEQ ID NO: 160673 - protein, 9 aa, Homo Sapiens
LYFGGAAAV

SEQ ID NO: 160674 - protein, 9 aa, Homo Sapiens
LYFIAPTGH

SEQ ID NO: 160675 - protein, 9 aa, Homo Sapiens
LYGPKYTFF

SEQ ID NO: 160676 - protein, 9 aa, Homo Sapiens
LYHFSSSEL

SEQ ID NO: 160677 - protein, 9 aa, Homo Sapiens
LYHGMALAL

SEQ ID NO: 160678 - protein, 9 aa, Homo Sapiens
LYHWSVESY

SEQ ID NO: 160679 - protein, 9 aa, Homo Sapiens
LYIHHAIDL

SEQ ID NO: 160680 - protein, 9 aa, Homo Sapiens
LYIQRTKSM

SEQ ID NO: 160681 - protein, 9 aa, Homo Sapiens
LYLPATTPY

SEQ ID NO: 160682 - protein, 9 aa, Homo Sapiens
LYLPMAQSV

SEQ ID NO: 160683 - protein, 9 aa, Homo Sapiens
LYLTSCVNY

SEQ ID NO: 160684 - protein, 9 aa, Homo Sapiens
LYNIMKEGL

SEQ ID NO: 160685 - protein, 9 aa, Homo Sapiens
LYPACLREM

SEQ ID NO: 160686 - protein, 9 aa, Homo Sapiens
LYPAVSAVY

SEQ ID NO: 160687 - protein, 9 aa, Homo Sapiens
LYPEYGAAF

SEQ ID NO: 160688 - protein, 9 aa, Homo Sapiens
LYQDFVRDY

SEQ ID NO: 160689 - protein, 9 aa, Homo Sapiens
LYQIQQVTM

SEQ ID NO: 160690 - protein, 9 aa, Homo Sapiens
LYQPSAESL

SEQ ID NO: 160691 - protein, 9 aa, Homo Sapiens
LYYIGGEVF

SEQ ID NO: 160692 - protein, 9 aa, Homo Sapiens
LYYNANRAF

SEQ ID NO: 160693 - protein, 9 aa, Homo Sapiens
LYYVGGEVY

SEQ ID NO: 160694 - protein, 9 aa, Homo Sapiens
MFCEKAMEL

SEQ ID NO: 160695 - protein, 9 aa, Homo Sapiens
MFFFSRLEY

SEQ ID NO: 160696 - protein, 9 aa, Homo Sapiens
MFYIAAVEK

SEQ ID NO: 160697 - protein, 9 aa, Homo Sapiens
MTQIMFETF

SEQ ID NO: 160698 - protein, 9 aa, Homo Sapiens
MYIARQLSF

SEQ ID NO: 160699 - protein, 9 aa, Homo Sapiens
MYPAFAEEY

SEQ ID NO: 160700 - protein, 9 aa, Homo Sapiens
MYPGIADRM

SEQ ID NO: 160701 - protein, 9 aa, Homo Sapiens
MYQDKLASL

SEQ ID NO: 160702 - protein, 9 aa, Homo Sapiens
MYSIMVHAL

SEQ ID NO: 160703 - protein, 9 aa, Homo Sapiens
NFFPSGIDF

SEQ ID NO: 160704 - protein, 9 aa, Homo Sapiens
NFFTKATPL

SEQ ID NO: 160705 - protein, 9 aa, Homo Sapiens
NFHGEWLEV

SEQ ID NO: 160706 - protein, 9 aa, Homo Sapiens
NFICPALEF

SEQ ID NO: 160707 - protein, 9 aa, Homo Sapiens
NFIEDVLGY

SEQ ID NO: 160708 - protein, 9 aa, Homo Sapiens
NFIEKVEAL

SEQ ID NO: 160709 - protein, 9 aa, Homo Sapiens
NFIPTGSAF

SEQ ID NO: 160710 - protein, 9 aa, Homo Sapiens
NFIRVLVSY

SEQ ID NO: 160711 - protein, 9 aa, Homo Sapiens
NFISGAGIL

SEQ ID NO: 160712 - protein, 9 aa, Homo Sapiens
NFITGVGIL

SEQ ID NO: 160713 - protein, 9 aa, Homo Sapiens
NFLALAREL

SEQ ID NO: 160714 - protein, 9 aa, Homo Sapiens
NFLAQTEAL

SEQ ID NO: 160715 - protein, 9 aa, Homo Sapiens
NFLGAENAF

SEQ ID NO: 160716 - protein, 9 aa, Homo Sapiens
NFLLHVTAL

SEQ ID NO: 160717 - protein, 9 aa, Homo Sapiens
NFLNMSRSM

SEQ ID NO: 160718 - protein, 9 aa, Homo Sapiens
NFLPEALDF

SEQ ID NO: 160719 - protein, 9 aa, Homo Sapiens
NFLSTLTSF

SEQ ID NO: 160720 - protein, 9 aa, Homo Sapiens
NFMLHLVSM

SEQ ID NO: 160721 - protein, 9 aa, Homo Sapiens
NFNMSVSSM

SEQ ID NO: 160722 - protein, 9 aa, Homo Sapiens
NFPEHIFPA

SEQ ID NO: 160723 - protein, 9 aa, Homo Sapiens
NFPGIVTSF

SEQ ID NO: 160724 - protein, 9 aa, Homo Sapiens
NFPIKARSL

SEQ ID NO: 160725 - protein, 9 aa, Homo Sapiens
NFPKVATSF

SEQ ID NO: 160726 - protein, 9 aa, Homo Sapiens
NFPNGVTDF

SEQ ID NO: 160727 - protein, 9 aa, Homo Sapiens
NFQAIRVTL

SEQ ID NO: 160728 - protein, 9 aa, Homo Sapiens
NFQAIVISL

SEQ ID NO: 160729 - protein, 9 aa, Homo Sapiens
NFQTAKEAL

SEQ ID NO: 160730 - protein, 9 aa, Homo Sapiens
NFYNFASSF

SEQ ID NO: 160731 - protein, 9 aa, Homo Sapiens
NFYSTEVSV

SEQ ID NO: 160732 - protein, 9 aa, Homo Sapiens
NYAEYQVCL

SEQ ID NO: 160733 - protein, 9 aa, Homo Sapiens
NYETMGRAL

SEQ ID NO: 160734 - protein, 9 aa, Homo Sapiens
NYFLRLCSF

SEQ ID NO: 160735 - protein, 9 aa, Homo Sapiens
NYFPGGVAL

SEQ ID NO: 160736 - protein, 9 aa, Homo Sapiens
NYHAMTEFL

SEQ ID NO: 160737 - protein, 9 aa, Homo Sapiens
NYHWQETAY

SEQ ID NO: 160738 - protein, 9 aa, Homo Sapiens
NYIDKVRFL

SEQ ID NO: 160739 - protein, 9 aa, Homo Sapiens
NYIEFTRIL

SEQ ID NO: 160740 - protein, 9 aa, Homo Sapiens
NYIEGTKML

SEQ ID NO: 160741 - protein, 9 aa, Homo Sapiens
NYIEKVVAI

SEQ ID NO: 160742 - protein, 9 aa, Homo Sapiens
NYIHVGAQL

SEQ ID NO: 160743 - protein, 9 aa, Homo Sapiens
NYIMQSHSL

SEQ ID NO: 160744 - protein, 9 aa, Homo Sapiens
NYIRDRLAL

SEQ ID NO: 160745 - protein, 9 aa, Homo Sapiens
NYMAHLVEV

SEQ ID NO: 160746 - protein, 9 aa, Homo Sapiens
NYMMRNAVL

SEQ ID NO: 160747 - protein, 9 aa, Homo Sapiens
NYNFQYISL

SEQ ID NO: 160748 - protein, 9 aa, Homo Sapiens
NYNPAQQAF

SEQ ID NO: 160749 - protein, 9 aa, Homo Sapiens
NYNTIFQYY

SEQ ID NO: 160750 - protein, 9 aa, Homo Sapiens
NYPAFMMEM

SEQ ID NO: 160751 - protein, 9 aa, Homo Sapiens
NYPGLSISL

SEQ ID NO: 160752 - protein, 9 aa, Homo Sapiens
NYPVTGLAF

SEQ ID NO: 160753 - protein, 9 aa, Homo Sapiens
NYQAYRSYL

SEQ ID NO: 160754 - protein, 9 aa, Homo Sapiens
NYQVQFVTL

SEQ ID NO: 160755 - protein, 9 aa, Homo Sapiens
NYVDLVSSL

SEQ ID NO: 160756 - protein, 9 aa, Homo Sapiens
NYVPEVSAL

SEQ ID NO: 160757 - protein, 9 aa, Homo Sapiens
NYYPGSLFL

SEQ ID NO: 160758 - protein, 9 aa, Homo Sapiens
NYYTPITPH

SEQ ID NO: 160759 - protein, 9 aa, Homo Sapiens
QFLRGARAM

SEQ ID NO: 160760 - protein, 9 aa, Homo Sapiens
QYFTARTSL

SEQ ID NO: 160761 - protein, 9 aa, Homo Sapiens
QYLELAHSL

SEQ ID NO: 160762 - protein, 9 aa, Homo Sapiens
QYPDFNNYL

SEQ ID NO: 160763 - protein, 9 aa, Homo Sapiens
QYPENILSF

SEQ ID NO: 160764 - protein, 9 aa, Homo Sapiens
QYPGSALAL

SEQ ID NO: 160765 - protein, 9 aa, Homo Sapiens
QYPWGVAEV

SEQ ID NO: 160766 - protein, 9 aa, Homo Sapiens
QYQPPAPAL

SEQ ID NO: 160767 - protein, 9 aa, Homo Sapiens
QYVIQLTSM

SEQ ID NO: 160768 - protein, 9 aa, Homo Sapiens
RFFAQSQSL

SEQ ID NO: 160769 - protein, 9 aa, Homo Sapiens
RFFDGAKDV

SEQ ID NO: 160770 - protein, 9 aa, Homo Sapiens
RFFTSSTSL

SEQ ID NO: 160771 - protein, 9 aa, Homo Sapiens
RFHEMHVAL

SEQ ID NO: 160772 - protein, 9 aa, Homo Sapiens
RFHTITTSY

SEQ ID NO: 160773 - protein, 9 aa, Homo Sapiens
RFIGATANF

SEQ ID NO: 160774 - protein, 9 aa, Homo Sapiens
RFIGAVNNM

SEQ ID NO: 160775 - protein, 9 aa, Homo Sapiens
RFIPSAYPY

SEQ ID NO: 160776 - protein, 9 aa, Homo Sapiens
RFIPYTEEF

SEQ ID NO: 160777 - protein, 9 aa, Homo Sapiens
RFLDKALEL

SEQ ID NO: 160778 - protein, 9 aa, Homo Sapiens
RFLENALAV

SEQ ID NO: 160779 - protein, 9 aa, Homo Sapiens
RFLYSNIAF

SEQ ID NO: 160780 - protein, 9 aa, Homo Sapiens
RFPDFVRDF

SEQ ID NO: 160781 - protein, 9 aa, Homo Sapiens
RFPDLTVEL

SEQ ID NO: 160782 - protein, 9 aa, Homo Sapiens
RFPDTVKQM

SEQ ID NO: 160783 - protein, 9 aa, Homo Sapiens
RFPEHVREI

SEQ ID NO: 160784 - protein, 9 aa, Homo Sapiens
RFPELSLAL

SEQ ID NO: 160785 - protein, 9 aa, Homo Sapiens
RFPNFTNQL

SEQ ID NO: 160786 - protein, 9 aa, Homo Sapiens
RFPQHYKSL

SEQ ID NO: 160787 - protein, 9 aa, Homo Sapiens
RFQDLIREL

SEQ ID NO: 160788 - protein, 9 aa, Homo Sapiens
RFQDQVLDL

SEQ ID NO: 160789 - protein, 9 aa, Homo Sapiens
RFQNYMVAL

SEQ ID NO: 160790 - protein, 9 aa, Homo Sapiens
RFSLNTVEL

SEQ ID NO: 160791 - protein, 9 aa, Homo Sapiens
RFYAFGRVF

SEQ ID NO: 160792 - protein, 9 aa, Homo Sapiens
RFYEGVVEL

SEQ ID NO: 160793 - protein, 9 aa, Homo Sapiens
RLPPYSSQL

SEQ ID NO: 160794 - protein, 9 aa, Homo Sapiens
RWPDYVREL

SEQ ID NO: 160795 - protein, 9 aa, Homo Sapiens
RYFGPAAAL

SEQ ID NO: 160796 - protein, 9 aa, Homo Sapiens
RYIGKTMDY

SEQ ID NO: 160797 - protein, 9 aa, Homo Sapiens
RYIPDAMNL

SEQ ID NO: 160798 - protein, 9 aa, Homo Sapiens
RYIPTAAAF

SEQ ID NO: 160799 - protein, 9 aa, Homo Sapiens
RYLEKCIAY

SEQ ID NO: 160800 - protein, 9 aa, Homo Sapiens
RYLGGSMDL

SEQ ID NO: 160801 - protein, 9 aa, Homo Sapiens
RYLGKVLEL

SEQ ID NO: 160802 - protein, 9 aa, Homo Sapiens
RYLSKVLEL

SEQ ID NO: 160803 - protein, 9 aa, Homo Sapiens
RYLTVAAVF

SEQ ID NO: 160804 - protein, 9 aa, Homo Sapiens
RYLYMVMEY

SEQ ID NO: 160805 - protein, 9 aa, Homo Sapiens
RYMAFAHDL

SEQ ID NO: 160806 - protein, 9 aa, Homo Sapiens
RYMNHMQSL

SEQ ID NO: 160807 - protein, 9 aa, Homo Sapiens
RYMVHLLEL

SEQ ID NO: 160808 - protein, 9 aa, Homo Sapiens
RYNVMHVAA

SEQ ID NO: 160809 - protein, 9 aa, Homo Sapiens
RYPDSILEH

SEQ ID NO: 160810 - protein, 9 aa, Homo Sapiens
RYPEETLSL

SEQ ID NO: 160811 - protein, 9 aa, Homo Sapiens
RYPTSIASL

SEQ ID NO: 160812 - protein, 9 aa, Homo Sapiens
RYQATGLHF

SEQ ID NO: 160813 - protein, 9 aa, Homo Sapiens
RYQDAIRVF

SEQ ID NO: 160814 - protein, 9 aa, Homo Sapiens
RYQEALSEL

SEQ ID NO: 160815 - protein, 9 aa, Homo Sapiens
RYQEFVRAL

SEQ ID NO: 160816 - protein, 9 aa, Homo Sapiens
RYQEKISAL

SEQ ID NO: 160817 - protein, 9 aa, Homo Sapiens
RYTVQFTTM

SEQ ID NO: 160818 - protein, 9 aa, Homo Sapiens
RYVAIARAL

SEQ ID NO: 160819 - protein, 9 aa, Homo Sapiens
RYVPRASYF

SEQ ID NO: 160820 - protein, 9 aa, Homo Sapiens
RYWNSYTEF

SEQ ID NO: 160821 - protein, 9 aa, Homo Sapiens
RYYAFDEAF

SEQ ID NO: 160822 - protein, 9 aa, Homo Sapiens
SFAAEAIAM

SEQ ID NO: 160823 - protein, 9 aa, Homo Sapiens
SFAAVIQAL

SEQ ID NO: 160824 - protein, 9 aa, Homo Sapiens
SFADFGSAL

SEQ ID NO: 160825 - protein, 9 aa, Homo Sapiens
SFFGAASQY

SEQ ID NO: 160826 - protein, 9 aa, Homo Sapiens
SFFGGSNPF

SEQ ID NO: 160827 - protein, 9 aa, Homo Sapiens
SFFPKVLEM

SEQ ID NO: 160828 - protein, 9 aa, Homo Sapiens
SFHAAGLQM

SEQ ID NO: 160829 - protein, 9 aa, Homo Sapiens
SFHHNVAAL

SEQ ID NO: 160830 - protein, 9 aa, Homo Sapiens
SFHTHVKEL

SEQ ID NO: 160831 - protein, 9 aa, Homo Sapiens
SFIAAGICF

SEQ ID NO: 160832 - protein, 9 aa, Homo Sapiens
SFIAFARVF

SEQ ID NO: 160833 - protein, 9 aa, Homo Sapiens
SFIENSSAL

SEQ ID NO: 160834 - protein, 9 aa, Homo Sapiens
SFIHAAMGM

SEQ ID NO: 160835 - protein, 9 aa, Homo Sapiens
SFILKANEL

SEQ ID NO: 160836 - protein, 9 aa, Homo Sapiens
SFIQGTTTM

SEQ ID NO: 160837 - protein, 9 aa, Homo Sapiens
SFISEAESL

SEQ ID NO: 160838 - protein, 9 aa, Homo Sapiens
SFISFANSR

SEQ ID NO: 160839 - protein, 9 aa, Homo Sapiens
SFISVIKEM

SEQ ID NO: 160840 - protein, 9 aa, Homo Sapiens
SFLAAAETL

SEQ ID NO: 160841 - protein, 9 aa, Homo Sapiens
SFLATGSNL

SEQ ID NO: 160842 - protein, 9 aa, Homo Sapiens
SFLATITSF

SEQ ID NO: 160843 - protein, 9 aa, Homo Sapiens
SFLDLARNI

SEQ ID NO: 160844 - protein, 9 aa, Homo Sapiens
SFLEDARAY

SEQ ID NO: 160845 - protein, 9 aa, Homo Sapiens
SFLEKTAVL

SEQ ID NO: 160846 - protein, 9 aa, Homo Sapiens
SFLETNVPL

SEQ ID NO: 160847 - protein, 9 aa, Homo Sapiens
SFLPSGSEM

SEQ ID NO: 160848 - protein, 9 aa, Homo Sapiens
SFMDPASAL

SEQ ID NO: 160849 - protein, 9 aa, Homo Sapiens
SFMDVSNPF

SEQ ID NO: 160850 - protein, 9 aa, Homo Sapiens
SFMEGAIIY

SEQ ID NO: 160851 - protein, 9 aa, Homo Sapiens
SFMGMVISH

SEQ ID NO: 160852 - protein, 9 aa, Homo Sapiens
SFMIMKTNF

SEQ ID NO: 160853 - protein, 9 aa, Homo Sapiens
SFMSGADSF

SEQ ID NO: 160854 - protein, 9 aa, Homo Sapiens
SFMYAHLAF

SEQ ID NO: 160855 - protein, 9 aa, Homo Sapiens
SFNKMSIEY

SEQ ID NO: 160856 - protein, 9 aa, Homo Sapiens
SFPAHRAVL

SEQ ID NO: 160857 - protein, 9 aa, Homo Sapiens
SFPENLRHL

SEQ ID NO: 160858 - protein, 9 aa, Homo Sapiens
SFPEVFTTY

SEQ ID NO: 160859 - protein, 9 aa, Homo Sapiens
SFPFVSKTL

SEQ ID NO: 160860 - protein, 9 aa, Homo Sapiens
SFPHMVLSL

SEQ ID NO: 160861 - protein, 9 aa, Homo Sapiens
SFPHPLPSL

SEQ ID NO: 160862 - protein, 9 aa, Homo Sapiens
SFPHTTPSM

SEQ ID NO: 160863 - protein, 9 aa, Homo Sapiens
SFPIFISAL

SEQ ID NO: 160864 - protein, 9 aa, Homo Sapiens
SFPQLRATM

SEQ ID NO: 160865 - protein, 9 aa, Homo Sapiens
SFPQPAAVY

SEQ ID NO: 160866 - protein, 9 aa, Homo Sapiens
SFPVNYKSL

SEQ ID NO: 160867 - protein, 9 aa, Homo Sapiens
SFQDFVSHF

SEQ ID NO: 160868 - protein, 9 aa, Homo Sapiens
SFQFAHLEF

SEQ ID NO: 160869 - protein, 9 aa, Homo Sapiens
SFQGMVTSF

SEQ ID NO: 160870 - protein, 9 aa, Homo Sapiens
SFSEFTSSL

SEQ ID NO: 160871 - protein, 9 aa, Homo Sapiens
SFSPGAGAF

SEQ ID NO: 160872 - protein, 9 aa, Homo Sapiens
SFVDQVREI

SEQ ID NO: 160873 - protein, 9 aa, Homo Sapiens
SFVDSVGVM

SEQ ID NO: 160874 - protein, 9 aa, Homo Sapiens
SFVIRALGF

SEQ ID NO: 160875 - protein, 9 aa, Homo Sapiens
SFVWHALDY

SEQ ID NO: 160876 - protein, 9 aa, Homo Sapiens
SLPAYLNSL

SEQ ID NO: 160877 - protein, 9 aa, Homo Sapiens
SMPLYAVMY

SEQ ID NO: 160878 - protein, 9 aa, Homo Sapiens
SPGAAVVML

SEQ ID NO: 160879 - protein, 9 aa, Homo Sapiens
SWPDGMLSM

SEQ ID NO: 160880 - protein, 9 aa, Homo Sapiens
SWPTYPQLY

SEQ ID NO: 160881 - protein, 9 aa, Homo Sapiens
SYENMVTEI

SEQ ID NO: 160882 - protein, 9 aa, Homo Sapiens
SYFGSFSSL

SEQ ID NO: 160883 - protein, 9 aa, Homo Sapiens
SYFMATNSL

SEQ ID NO: 160884 - protein, 9 aa, Homo Sapiens
SYFPKILTF

SEQ ID NO: 160885 - protein, 9 aa, Homo Sapiens
SYFSSTKTL

SEQ ID NO: 160886 - protein, 9 aa, Homo Sapiens
SYGAAGLAF

SEQ ID NO: 160887 - protein, 9 aa, Homo Sapiens
SYHPSGLSL

SEQ ID NO: 160888 - protein, 9 aa, Homo Sapiens
SYHSYVIGF

SEQ ID NO: 160889 - protein, 9 aa, Homo Sapiens
SYIAMDTEF

SEQ ID NO: 160890 - protein, 9 aa, Homo Sapiens
SYIIGTSSV

SEQ ID NO: 160891 - protein, 9 aa, Homo Sapiens
SYISEVKEV

SEQ ID NO: 160892 - protein, 9 aa, Homo Sapiens
SYIYGAQHL

SEQ ID NO: 160893 - protein, 9 aa, Homo Sapiens
SYLDFTNPK

SEQ ID NO: 160894 - protein, 9 aa, Homo Sapiens
SYLFSHVPL

SEQ ID NO: 160895 - protein, 9 aa, Homo Sapiens
SYLIARIAL

SEQ ID NO: 160896 - protein, 9 aa, Homo Sapiens
SYLITSVEL

SEQ ID NO: 160897 - protein, 9 aa, Homo Sapiens
SYLPEAGQY

SEQ ID NO: 160898 - protein, 9 aa, Homo Sapiens
SYLPHAPPF

SEQ ID NO: 160899 - protein, 9 aa, Homo Sapiens
SYLPLAHMF

SEQ ID NO: 160900 - protein, 9 aa, Homo Sapiens
SYLTSASSL

SEQ ID NO: 160901 - protein, 9 aa, Homo Sapiens
SYMDPMNEY

SEQ ID NO: 160902 - protein, 9 aa, Homo Sapiens
SYMESVVTF

SEQ ID NO: 160903 - protein, 9 aa, Homo Sapiens
SYMPTVSHL

SEQ ID NO: 160904 - protein, 9 aa, Homo Sapiens
SYMWTINNF

SEQ ID NO: 160905 - protein, 9 aa, Homo Sapiens
SYNDYLRAA

SEQ ID NO: 160906 - protein, 9 aa, Homo Sapiens
SYNDYVREF

SEQ ID NO: 160907 - protein, 9 aa, Homo Sapiens
SYNLTVREL

SEQ ID NO: 160908 - protein, 9 aa, Homo Sapiens
SYPDAILQA

SEQ ID NO: 160909 - protein, 9 aa, Homo Sapiens
SYPDFLRMM

SEQ ID NO: 160910 - protein, 9 aa, Homo Sapiens
SYPDNFLHI

SEQ ID NO: 160911 - protein, 9 aa, Homo Sapiens
SYPFDFLEF

SEQ ID NO: 160912 - protein, 9 aa, Homo Sapiens
SYPHHATQL

SEQ ID NO: 160913 - protein, 9 aa, Homo Sapiens
SYPLFSQEF

SEQ ID NO: 160914 - protein, 9 aa, Homo Sapiens
SYPSVVSTL

SEQ ID NO: 160915 - protein, 9 aa, Homo Sapiens
SYQDLVKCF

SEQ ID NO: 160916 - protein, 9 aa, Homo Sapiens
SYQEHVKQL

SEQ ID NO: 160917 - protein, 9 aa, Homo Sapiens
SYQILTRQL

SEQ ID NO: 160918 - protein, 9 aa, Homo Sapiens
SYSSIASEF

SEQ ID NO: 160919 - protein, 9 aa, Homo Sapiens
SYYAVAHAV

SEQ ID NO: 160920 - protein, 9 aa, Homo Sapiens
SYYAYVVEL

SEQ ID NO: 160921 - protein, 9 aa, Homo Sapiens
SYYEEALEL

SEQ ID NO: 160922 - protein, 9 aa, Homo Sapiens
SYYKDALRF

SEQ ID NO: 160923 - protein, 9 aa, Homo Sapiens
SYYSPSIGF

SEQ ID NO: 160924 - protein, 9 aa, Homo Sapiens
SYYTVAHAI

SEQ ID NO: 160925 - protein, 9 aa, Homo Sapiens
TFGERVVAF

SEQ ID NO: 160926 - protein, 9 aa, Homo Sapiens
TFIDDISAY

SEQ ID NO: 160927 - protein, 9 aa, Homo Sapiens
TFIDPRIPL

SEQ ID NO: 160928 - protein, 9 aa, Homo Sapiens
TFINNVISH

SEQ ID NO: 160929 - protein, 9 aa, Homo Sapiens
TFLEAGVEM

SEQ ID NO: 160930 - protein, 9 aa, Homo Sapiens
TFMPVASGL

SEQ ID NO: 160931 - protein, 9 aa, Homo Sapiens
TFNEDVQAL

SEQ ID NO: 160932 - protein, 9 aa, Homo Sapiens
TFNNPTTEF

SEQ ID NO: 160933 - protein, 9 aa, Homo Sapiens
TFPDIIRNY

SEQ ID NO: 160934 - protein, 9 aa, Homo Sapiens
TFPLQVLGF

SEQ ID NO: 160935 - protein, 9 aa, Homo Sapiens
TFPMQCSAL

SEQ ID NO: 160936 - protein, 9 aa, Homo Sapiens
TFPSDITEF

SEQ ID NO: 160937 - protein, 9 aa, Homo Sapiens
TFQDKTLNF

SEQ ID NO: 160938 - protein, 9 aa, Homo Sapiens
TFQSRTLAL

SEQ ID NO: 160939 - protein, 9 aa, Homo Sapiens
TLPHEILEM

SEQ ID NO: 160940 - protein, 9 aa, Homo Sapiens
TWPDGWTAV

SEQ ID NO: 160941 - protein, 9 aa, Homo Sapiens
TYFIVGTAM

SEQ ID NO: 160942 - protein, 9 aa, Homo Sapiens
TYGERVVAF

SEQ ID NO: 160943 - protein, 9 aa, Homo Sapiens
TYIGSVEPL

SEQ ID NO: 160944 - protein, 9 aa, Homo Sapiens
TYINHVVSV

SEQ ID NO: 160945 - protein, 9 aa, Homo Sapiens
TYLGVAASL

SEQ ID NO: 160946 - protein, 9 aa, Homo Sapiens
TYLPAGQSV

SEQ ID NO: 160947 - protein, 9 aa, Homo Sapiens
TYLQTMVFY

SEQ ID NO: 160948 - protein, 9 aa, Homo Sapiens
TYMAMYLTY

SEQ ID NO: 160949 - protein, 9 aa, Homo Sapiens
TYNTQVNFM

SEQ ID NO: 160950 - protein, 9 aa, Homo Sapiens
TYPAGFMDV

SEQ ID NO: 160951 - protein, 9 aa, Homo Sapiens
TYPPYVPEY

SEQ ID NO: 160952 - protein, 9 aa, Homo Sapiens
TYPSLPKSL

SEQ ID NO: 160953 - protein, 9 aa, Homo Sapiens
TYPSNILSH

SEQ ID NO: 160954 - protein, 9 aa, Homo Sapiens
TYQAMVHEL

SEQ ID NO: 160955 - protein, 9 aa, Homo Sapiens
TYQKLARAL

SEQ ID NO: 160956 - protein, 9 aa, Homo Sapiens
TYQRSVLAL

SEQ ID NO: 160957 - protein, 9 aa, Homo Sapiens
TYQVLAVTF

SEQ ID NO: 160958 - protein, 9 aa, Homo Sapiens
TYQVQKLSL

SEQ ID NO: 160959 - protein, 9 aa, Homo Sapiens
TYQVYGLAL

SEQ ID NO: 160960 - protein, 9 aa, Homo Sapiens
TYSEFAREL

SEQ ID NO: 160961 - protein, 9 aa, Homo Sapiens
TYVTEVREL

SEQ ID NO: 160962 - protein, 9 aa, Homo Sapiens
TYVTPRRPF

SEQ ID NO: 160963 - protein, 9 aa, Homo Sapiens
VANTMRTSL

SEQ ID NO: 160964 - protein, 9 aa, Homo Sapiens
VAPEEHPVL

SEQ ID NO: 160965 - protein, 9 aa, Homo Sapiens
VAYVSSVAL

SEQ ID NO: 160966 - protein, 9 aa, Homo Sapiens
VFAPPAEAY

SEQ ID NO: 160967 - protein, 9 aa, Homo Sapiens
VFHVSNLEF

SEQ ID NO: 160968 - protein, 9 aa, Homo Sapiens
VFIDEIDAI

SEQ ID NO: 160969 - protein, 9 aa, Homo Sapiens
VFIDGPLAL

SEQ ID NO: 160970 - protein, 9 aa, Homo Sapiens
VFLEAAKAL

SEQ ID NO: 160971 - protein, 9 aa, Homo Sapiens
VFLERGEVM

SEQ ID NO: 160972 - protein, 9 aa, Homo Sapiens
VFLLDLGKV

SEQ ID NO: 160973 - protein, 9 aa, Homo Sapiens
VFLPRALAL

SEQ ID NO: 160974 - protein, 9 aa, Homo Sapiens
VFLPRVTEL

SEQ ID NO: 160975 - protein, 9 aa, Homo Sapiens
VFMHVSTAY

SEQ ID NO: 160976 - protein, 9 aa, Homo Sapiens
VFMISSHEL

SEQ ID NO: 160977 - protein, 9 aa, Homo Sapiens
VFMPHVTEA

SEQ ID NO: 160978 - protein, 9 aa, Homo Sapiens
VFPDFYLHL

SEQ ID NO: 160979 - protein, 9 aa, Homo Sapiens
VFPEFAAAH

SEQ ID NO: 160980 - protein, 9 aa, Homo Sapiens
VFPEKGYSF

SEQ ID NO: 160981 - protein, 9 aa, Homo Sapiens
VFPKPVTAL

SEQ ID NO: 160982 - protein, 9 aa, Homo Sapiens
VFPLAAGIF

SEQ ID NO: 160983 - protein, 9 aa, Homo Sapiens
VFPLFSSEL

SEQ ID NO: 160984 - protein, 9 aa, Homo Sapiens
VFPTRTARF

SEQ ID NO: 160985 - protein, 9 aa, Homo Sapiens
VFPWHKNLL

SEQ ID NO: 160986 - protein, 9 aa, Homo Sapiens
VFQERINCL

SEQ ID NO: 160987 - protein, 9 aa, Homo Sapiens
VFQEVGINY

SEQ ID NO: 160988 - protein, 9 aa, Homo Sapiens
VFQPETSTL

SEQ ID NO: 160989 - protein, 9 aa, Homo Sapiens
VFQPSVKSL

SEQ ID NO: 160990 - protein, 9 aa, Homo Sapiens
VFQPSVRSL

SEQ ID NO: 160991 - protein, 9 aa, Homo Sapiens
VFQQVGVSM

SEQ ID NO: 160992 - protein, 9 aa, Homo Sapiens
VFQVKTLSL

SEQ ID NO: 160993 - protein, 9 aa, Homo Sapiens
VFQYRLVEY

SEQ ID NO: 160994 - protein, 9 aa, Homo Sapiens
VFSDGAVSL

SEQ ID NO: 160995 - protein, 9 aa, Homo Sapiens
VFSVRGTSF

SEQ ID NO: 160996 - protein, 9 aa, Homo Sapiens
VFVDRAACF

SEQ ID NO: 160997 - protein, 9 aa, Homo Sapiens
VFVDRAGEW

SEQ ID NO: 160998 - protein, 9 aa, Homo Sapiens
VFVDRTLDL

SEQ ID NO: 160999 - protein, 9 aa, Homo Sapiens
VFVEATHVL

SEQ ID NO: 161000 - protein, 9 aa, Homo Sapiens
VFVEDVDSF

SEQ ID NO: 161001 - protein, 9 aa, Homo Sapiens
VFVVDSAAF

SEQ ID NO: 161002 - protein, 9 aa, Homo Sapiens
VFYELAHQL

SEQ ID NO: 161003 - protein, 9 aa, Homo Sapiens
VFYPSSLAF

SEQ ID NO: 161004 - protein, 9 aa, Homo Sapiens
VFYPYPQYF

SEQ ID NO: 161005 - protein, 9 aa, Homo Sapiens
VLPVYMNCL

SEQ ID NO: 161006 - protein, 9 aa, Homo Sapiens
VMINKATPY

SEQ ID NO: 161007 - protein, 9 aa, Homo Sapiens
VVNIQTIAM

SEQ ID NO: 161008 - protein, 9 aa, Homo Sapiens
VVVDVSHED

SEQ ID NO: 161009 - protein, 9 aa, Homo Sapiens
VYAFSARPL

SEQ ID NO: 161010 - protein, 9 aa, Homo Sapiens
VYALQQTAL

SEQ ID NO: 161011 - protein, 9 aa, Homo Sapiens
VYEGEVTEL

SEQ ID NO: 161012 - protein, 9 aa, Homo Sapiens
VYFASLLTV

SEQ ID NO: 161013 - protein, 9 aa, Homo Sapiens
VYFGIAASL

SEQ ID NO: 161014 - protein, 9 aa, Homo Sapiens
VYFPALTSL

SEQ ID NO: 161015 - protein, 9 aa, Homo Sapiens
VYFPWVSQY

SEQ ID NO: 161016 - protein, 9 aa, Homo Sapiens
VYFQMQTTY

SEQ ID NO: 161017 - protein, 9 aa, Homo Sapiens
VYFSAAHAL

SEQ ID NO: 161018 - protein, 9 aa, Homo Sapiens
VYFTQGLGL

SEQ ID NO: 161019 - protein, 9 aa, Homo Sapiens
VYFVQKNSL

SEQ ID NO: 161020 - protein, 9 aa, Homo Sapiens
VYHEILIGY

SEQ ID NO: 161021 - protein, 9 aa, Homo Sapiens
VYHVVGVDV

SEQ ID NO: 161022 - protein, 9 aa, Homo Sapiens
VYIDKVRSL

SEQ ID NO: 161023 - protein, 9 aa, Homo Sapiens
VYIDQTMVL

SEQ ID NO: 161024 - protein, 9 aa, Homo Sapiens
VYIDRVRSL

SEQ ID NO: 161025 - protein, 9 aa, Homo Sapiens
VYIEHRLMM

SEQ ID NO: 161026 - protein, 9 aa, Homo Sapiens
VYIGVHVPF

SEQ ID NO: 161027 - protein, 9 aa, Homo Sapiens
VYINTAQEF

SEQ ID NO: 161028 - protein, 9 aa, Homo Sapiens
VYIPFSAIY

SEQ ID NO: 161029 - protein, 9 aa, Homo Sapiens
VYISNGQVL

SEQ ID NO: 161030 - protein, 9 aa, Homo Sapiens
VYISSRPPL

SEQ ID NO: 161031 - protein, 9 aa, Homo Sapiens
VYLERLLTY

SEQ ID NO: 161032 - protein, 9 aa, Homo Sapiens
VYLFTEAYY

SEQ ID NO: 161033 - protein, 9 aa, Homo Sapiens
VYLPMSYCY

SEQ ID NO: 161034 - protein, 9 aa, Homo Sapiens
VYLPTHTSL

SEQ ID NO: 161035 - protein, 9 aa, Homo Sapiens
VYLYYKLAY

SEQ ID NO: 161036 - protein, 9 aa, Homo Sapiens
VYMNRVKEI

SEQ ID NO: 161037 - protein, 9 aa, Homo Sapiens
VYNFSLVAL

SEQ ID NO: 161038 - protein, 9 aa, Homo Sapiens
VYNVQYSFI

SEQ ID NO: 161039 - protein, 9 aa, Homo Sapiens
VYNVTQHAV

SEQ ID NO: 161040 - protein, 9 aa, Homo Sapiens
VYNYAEQTL

SEQ ID NO: 161041 - protein, 9 aa, Homo Sapiens
VYPDGIRHI

SEQ ID NO: 161042 - protein, 9 aa, Homo Sapiens
VYPEYVIQY

SEQ ID NO: 161043 - protein, 9 aa, Homo Sapiens
VYPLYTIVF

SEQ ID NO: 161044 - protein, 9 aa, Homo Sapiens
VYPMPRVIF

SEQ ID NO: 161045 - protein, 9 aa, Homo Sapiens
VYPPGFMGL

SEQ ID NO: 161046 - protein, 9 aa, Homo Sapiens
VYPPPHQVF

SEQ ID NO: 161047 - protein, 9 aa, Homo Sapiens
VYPQYVIEY

SEQ ID NO: 161048 - protein, 9 aa, Homo Sapiens
VYPTAVHVL

SEQ ID NO: 161049 - protein, 9 aa, Homo Sapiens
VYQEIWIGM

SEQ ID NO: 161050 - protein, 9 aa, Homo Sapiens
VYQIAMVHY

SEQ ID NO: 161051 - protein, 9 aa, Homo Sapiens
VYQNIFTAM

SEQ ID NO: 161052 - protein, 9 aa, Homo Sapiens
VYQNQIAEL

SEQ ID NO: 161053 - protein, 9 aa, Homo Sapiens
VYQTYVNAM

SEQ ID NO: 161054 - protein, 9 aa, Homo Sapiens
VYQYMHETI

SEQ ID NO: 161055 - protein, 9 aa, Homo Sapiens
VYSNPVSSL

SEQ ID NO: 161056 - protein, 9 aa, Homo Sapiens
VYVAAVREF

SEQ ID NO: 161057 - protein, 9 aa, Homo Sapiens
VYVERAEVL

SEQ ID NO: 161058 - protein, 9 aa, Homo Sapiens
VYVKHSISF

SEQ ID NO: 161059 - protein, 9 aa, Homo Sapiens
VYVMGGVAM

SEQ ID NO: 161060 - protein, 9 aa, Homo Sapiens
VYVVGTAHF

SEQ ID NO: 161061 - protein, 9 aa, Homo Sapiens
VYWVARKPM

SEQ ID NO: 161062 - protein, 9 aa, Homo Sapiens
VYYEVAGHL

SEQ ID NO: 161063 - protein, 9 aa, Homo Sapiens
VYYFSKGTL

SEQ ID NO: 161064 - protein, 9 aa, Homo Sapiens
VYYPELFVW

SEQ ID NO: 161065 - protein, 9 aa, Homo Sapiens
WFHYTLVAF

SEQ ID NO: 161066 - protein, 9 aa, Homo Sapiens
WFIPFVQSL

SEQ ID NO: 161067 - protein, 9 aa, Homo Sapiens
WYQRVYQSL

SEQ ID NO: 161068 - protein, 9 aa, Homo Sapiens
WYYSTKVQL

SEQ ID NO: 161069 - protein, 9 aa, Homo Sapiens
YFADGVLSL

SEQ ID NO: 161070 - protein, 9 aa, Homo Sapiens
YFEDVANAM

SEQ ID NO: 161071 - protein, 9 aa, Homo Sapiens
YFEGGVSSV

SEQ ID NO: 161072 - protein, 9 aa, Homo Sapiens
YFFAVDTAY

SEQ ID NO: 161073 - protein, 9 aa, Homo Sapiens
YFHDATRVY

SEQ ID NO: 161074 - protein, 9 aa, Homo Sapiens
YFHDRFLEL

SEQ ID NO: 161075 - protein, 9 aa, Homo Sapiens
YFHDRVASF

SEQ ID NO: 161076 - protein, 9 aa, Homo Sapiens
YFHEFGHVM

SEQ ID NO: 161077 - protein, 9 aa, Homo Sapiens
YFHIGSNAL

SEQ ID NO: 161078 - protein, 9 aa, Homo Sapiens
YFHTMVESL

SEQ ID NO: 161079 - protein, 9 aa, Homo Sapiens
YFILNSSCL

SEQ ID NO: 161080 - protein, 9 aa, Homo Sapiens
YFIRDVKSL

SEQ ID NO: 161081 - protein, 9 aa, Homo Sapiens
YFISHILAF

SEQ ID NO: 161082 - protein, 9 aa, Homo Sapiens
YFISYGIEH

SEQ ID NO: 161083 - protein, 9 aa, Homo Sapiens
YFIVTRQDY

SEQ ID NO: 161084 - protein, 9 aa, Homo Sapiens
YFKPMMKEF

SEQ ID NO: 161085 - protein, 9 aa, Homo Sapiens
YFLEWRSVL

SEQ ID NO: 161086 - protein, 9 aa, Homo Sapiens
YFLNRKLVY

SEQ ID NO: 161087 - protein, 9 aa, Homo Sapiens
YFLPLANTL

SEQ ID NO: 161088 - protein, 9 aa, Homo Sapiens
YFLSRAQSL

SEQ ID NO: 161089 - protein, 9 aa, Homo Sapiens
YFLTTRQTL

SEQ ID NO: 161090 - protein, 9 aa, Homo Sapiens
YFPDKVALL

SEQ ID NO: 161091 - protein, 9 aa, Homo Sapiens
YFPELIANF

SEQ ID NO: 161092 - protein, 9 aa, Homo Sapiens
YFPGQAIAM

SEQ ID NO: 161093 - protein, 9 aa, Homo Sapiens
YFPHYEVPL

SEQ ID NO: 161094 - protein, 9 aa, Homo Sapiens
YFPKALAPL

SEQ ID NO: 161095 - protein, 9 aa, Homo Sapiens
YFPKKISEL

SEQ ID NO: 161096 - protein, 9 aa, Homo Sapiens
YFPTQALNF

SEQ ID NO: 161097 - protein, 9 aa, Homo Sapiens
YFQAKIRAL

SEQ ID NO: 161098 - protein, 9 aa, Homo Sapiens
YFQALVNNM

SEQ ID NO: 161099 - protein, 9 aa, Homo Sapiens
YFQHREFSF

SEQ ID NO: 161100 - protein, 9 aa, Homo Sapiens
YFQTTSTNL

SEQ ID NO: 161101 - protein, 9 aa, Homo Sapiens
YFVDDRLVM

SEQ ID NO: 161102 - protein, 9 aa, Homo Sapiens
YFWPRTVPM

SEQ ID NO: 161103 - protein, 9 aa, Homo Sapiens
YFYVIGSSY

SEQ ID NO: 161104 - protein, 9 aa, Homo Sapiens
YLHPLRSLF

SEQ ID NO: 161105 - protein, 9 aa, Homo Sapiens
YMNVMLENY

SEQ ID NO: 161106 - protein, 9 aa, Homo Sapiens
YMPAKIGAF

SEQ ID NO: 161107 - protein, 9 aa, Homo Sapiens
YMPQNPHII

SEQ ID NO: 161108 - protein, 9 aa, Homo Sapiens
YWPDVIHSF

SEQ ID NO: 161109 - protein, 9 aa, Homo Sapiens
YYEFREEAY

SEQ ID NO: 161110 - protein, 9 aa, Homo Sapiens
YYFALAHTV

SEQ ID NO: 161111 - protein, 9 aa, Homo Sapiens
YYFDSYAHF

SEQ ID NO: 161112 - protein, 9 aa, Homo Sapiens
YYFDYKEQL

SEQ ID NO: 161113 - protein, 9 aa, Homo Sapiens
YYFFTPYVY

SEQ ID NO: 161114 - protein, 9 aa, Homo Sapiens
YYFSKLIEF

SEQ ID NO: 161115 - protein, 9 aa, Homo Sapiens
YYFVFDHAL

SEQ ID NO: 161116 - protein, 9 aa, Homo Sapiens
YYFVTREVM

SEQ ID NO: 161117 - protein, 9 aa, Homo Sapiens
YYHARVYEF

SEQ ID NO: 161118 - protein, 9 aa, Homo Sapiens
YYHSYWHSM

SEQ ID NO: 161119 - protein, 9 aa, Homo Sapiens
YYHYSYSVV

SEQ ID NO: 161120 - protein, 9 aa, Homo Sapiens
YYIDCIRQV

SEQ ID NO: 161121 - protein, 9 aa, Homo Sapiens
YYIEGINQL

SEQ ID NO: 161122 - protein, 9 aa, Homo Sapiens
YYINIRKAL

SEQ ID NO: 161123 - protein, 9 aa, Homo Sapiens
YYISPRITF

SEQ ID NO: 161124 - protein, 9 aa, Homo Sapiens
YYITTRAQF

SEQ ID NO: 161125 - protein, 9 aa, Homo Sapiens
YYITTRVQF

SEQ ID NO: 161126 - protein, 9 aa, Homo Sapiens
YYKNIGLGF

SEQ ID NO: 161127 - protein, 9 aa, Homo Sapiens
YYLARLLGL

SEQ ID NO: 161128 - protein, 9 aa, Homo Sapiens
YYLGKILEM

SEQ ID NO: 161129 - protein, 9 aa, Homo Sapiens
YYLNEIQSF

SEQ ID NO: 161130 - protein, 9 aa, Homo Sapiens
YYLPKDDEY

SEQ ID NO: 161131 - protein, 9 aa, Homo Sapiens
YYLPKLLSY

SEQ ID NO: 161132 - protein, 9 aa, Homo Sapiens
YYLTFVQEL

SEQ ID NO: 161133 - protein, 9 aa, Homo Sapiens
YYLTHGLYL

SEQ ID NO: 161134 - protein, 9 aa, Homo Sapiens
YYLVKREDY

SEQ ID NO: 161135 - protein, 9 aa, Homo Sapiens
YYLWMLHSV

SEQ ID NO: 161136 - protein, 9 aa, Homo Sapiens
YYMDYLAAL

SEQ ID NO: 161137 - protein, 9 aa, Homo Sapiens
YYNLQGISH

SEQ ID NO: 161138 - protein, 9 aa, Homo Sapiens
YYPAKIEAI

SEQ ID NO: 161139 - protein, 9 aa, Homo Sapiens
YYPEHTSVL

SEQ ID NO: 161140 - protein, 9 aa, Homo Sapiens
YYPELAFQF

SEQ ID NO: 161141 - protein, 9 aa, Homo Sapiens
YYPEYLINL

SEQ ID NO: 161142 - protein, 9 aa, Homo Sapiens
YYPFHYAPF

SEQ ID NO: 161143 - protein, 9 aa, Homo Sapiens
YYPQQAIVF

SEQ ID NO: 161144 - protein, 9 aa, Homo Sapiens
YYPSDVSSL

SEQ ID NO: 161145 - protein, 9 aa, Homo Sapiens
YYPYTITEY

SEQ ID NO: 161146 - protein, 9 aa, Homo Sapiens
YYQDTPKQI

SEQ ID NO: 161147 - protein, 9 aa, Homo Sapiens
YYQHIVTTL

SEQ ID NO: 161148 - protein, 9 aa, Homo Sapiens
YYQLMKTAL

SEQ ID NO: 161149 - protein, 9 aa, Homo Sapiens
YYQNHIMNL

SEQ ID NO: 161150 - protein, 9 aa, Homo Sapiens
YYQPLVHLL

SEQ ID NO: 161151 - protein, 9 aa, Homo Sapiens
YYQSSVQYL

SEQ ID NO: 161152 - protein, 9 aa, Homo Sapiens
YYQTPRLWL

SEQ ID NO: 161153 - protein, 9 aa, Homo Sapiens
YYQYMETYM

SEQ ID NO: 161154 - protein, 9 aa, Homo Sapiens
YYRDYPTLV

SEQ ID NO: 161155 - protein, 9 aa, Homo Sapiens
YYSPHGHIL

SEQ ID NO: 161156 - protein, 9 aa, Homo Sapiens
YYTDFVMEL

SEQ ID NO: 161157 - protein, 9 aa, Homo Sapiens
YYTVRQLEL

SEQ ID NO: 161158 - protein, 9 aa, Homo Sapiens
YYVRKVLEL

SEQ ID NO: 161159 - protein, 9 aa, Homo Sapiens
YYVWTVKEV

SEQ ID NO: 161160 - protein, 9 aa, Homo Sapiens
YYYDKNIIH

SEQ ID NO: 161161 - protein, 9 aa, Homo Sapiens
YYYDPTTGL

SEQ ID NO: 161162 - protein, 9 aa, Homo Sapiens
YYYNGKAVY

SEQ ID NO: 161163 - protein, 10 aa, Homo Sapiens
AFFEEERSAL

SEQ ID NO: 161164 - protein, 10 aa, Homo Sapiens
AFFPGFPLAL

SEQ ID NO: 161165 - protein, 10 aa, Homo Sapiens
AFFTSKALNM

SEQ ID NO: 161166 - protein, 10 aa, Homo Sapiens
AFPEIHVAQY

SEQ ID NO: 161167 - protein, 10 aa, Homo Sapiens
AFPGGPLGAL

SEQ ID NO: 161168 - protein, 10 aa, Homo Sapiens
AFVDKPVSPY

SEQ ID NO: 161169 - protein, 10 aa, Homo Sapiens
AFVTFSTRAM

SEQ ID NO: 161170 - protein, 10 aa, Homo Sapiens
AFVTFTTRAM

SEQ ID NO: 161171 - protein, 10 aa, Homo Sapiens
AFYDWDNTEL

SEQ ID NO: 161172 - protein, 10 aa, Homo Sapiens
AFYEHAQTYY

SEQ ID NO: 161173 - protein, 10 aa, Homo Sapiens
AFYMDTSHLF

SEQ ID NO: 161174 - protein, 10 aa, Homo Sapiens
AWIDAEVTEF

SEQ ID NO: 161175 - protein, 10 aa, Homo Sapiens
AYIDPIAMEY

SEQ ID NO: 161176 - protein, 10 aa, Homo Sapiens
AYMDAPKAAL

SEQ ID NO: 161177 - protein, 10 aa, Homo Sapiens
AYMELVNNML

SEQ ID NO: 161178 - protein, 10 aa, Homo Sapiens
AYPDFAPQKF

SEQ ID NO: 161179 - protein, 10 aa, Homo Sapiens
AYYEFREEAY

SEQ ID NO: 161180 - protein, 10 aa, Homo Sapiens
AYYLGKILEM

SEQ ID NO: 161181 - protein, 10 aa, Homo Sapiens
AYYPSDVSSL

SEQ ID NO: 161182 - protein, 10 aa, Homo Sapiens
FFFDSAMESY

SEQ ID NO: 161183 - protein, 10 aa, Homo Sapiens
FFFGKSTLPF

SEQ ID NO: 161184 - protein, 10 aa, Homo Sapiens
FFFPTQGHDY

SEQ ID NO: 161185 - protein, 10 aa, Homo Sapiens
FFFTARTSFF

SEQ ID NO: 161186 - protein, 10 aa, Homo Sapiens
FFFTGPLSHF

SEQ ID NO: 161187 - protein, 10 aa, Homo Sapiens
FFPDKPITQY

SEQ ID NO: 161188 - protein, 10 aa, Homo Sapiens
FFPEAAQVAY

SEQ ID NO: 161189 - protein, 10 aa, Homo Sapiens
FFPEYTHQLF

SEQ ID NO: 161190 - protein, 10 aa, Homo Sapiens
FFPSTFQPSY

SEQ ID NO: 161191 - protein, 10 aa, Homo Sapiens
FFPYYVYNII

SEQ ID NO: 161192 - protein, 10 aa, Homo Sapiens
FFQETKTGEL

SEQ ID NO: 161193 - protein, 10 aa, Homo Sapiens
FFYDGIKAIF

SEQ ID NO: 161194 - protein, 10 aa, Homo Sapiens
FFYEGSRVLF

SEQ ID NO: 161195 - protein, 10 aa, Homo Sapiens
FFYNEHTNDF

SEQ ID NO: 161196 - protein, 10 aa, Homo Sapiens
FFYNLIHPEY

SEQ ID NO: 161197 - protein, 10 aa, Homo Sapiens
FHPEAHAITL

SEQ ID NO: 161198 - protein, 10 aa, Homo Sapiens
FLPARFYQAL

SEQ ID NO: 161199 - protein, 10 aa, Homo Sapiens
FLPEEAWCDL

SEQ ID NO: 161200 - protein, 10 aa, Homo Sapiens
FYADFGPLNL

SEQ ID NO: 161201 - protein, 10 aa, Homo Sapiens
FYFDNILNSF

SEQ ID NO: 161202 - protein, 10 aa, Homo Sapiens
FYFDRDDVAL

SEQ ID NO: 161203 - protein, 10 aa, Homo Sapiens
FYFWPRTVPM

SEQ ID NO: 161204 - protein, 10 aa, Homo Sapiens
FYHLGVRESF

SEQ ID NO: 161205 - protein, 10 aa, Homo Sapiens
FYNQVSTPLL

SEQ ID NO: 161206 - protein, 10 aa, Homo Sapiens
FYPEELDQLL

SEQ ID NO: 161207 - protein, 10 aa, Homo Sapiens
FYPGASPTEF

SEQ ID NO: 161208 - protein, 10 aa, Homo Sapiens
FYPGWKVLVF

SEQ ID NO: 161209 - protein, 10 aa, Homo Sapiens
FYPIYFRPLM

SEQ ID NO: 161210 - protein, 10 aa, Homo Sapiens
FYQDTFGQQW

SEQ ID NO: 161211 - protein, 10 aa, Homo Sapiens
FYTPQNPSSL

SEQ ID NO: 161212 - protein, 10 aa, Homo Sapiens
FYYDGKVMKL

SEQ ID NO: 161213 - protein, 10 aa, Homo Sapiens
FYYFPDSGFF

SEQ ID NO: 161214 - protein, 10 aa, Homo Sapiens
GGYDGYRPSF

SEQ ID NO: 161215 - protein, 10 aa, Homo Sapiens
HFFEFLTKEL

SEQ ID NO: 161216 - protein, 10 aa, Homo Sapiens
HFGGGGFLAF

SEQ ID NO: 161217 - protein, 10 aa, Homo Sapiens
HFIGNCVSSF

SEQ ID NO: 161218 - protein, 10 aa, Homo Sapiens
HFPSNLVTEM

SEQ ID NO: 161219 - protein, 10 aa, Homo Sapiens
HFSVEGQLEF

SEQ ID NO: 161220 - protein, 10 aa, Homo Sapiens
IFIDRDPAAF

SEQ ID NO: 161221 - protein, 10 aa, Homo Sapiens
IFIDRDPTVF

SEQ ID NO: 161222 - protein, 10 aa, Homo Sapiens
IFLDSKGLEY

SEQ ID NO: 161223 - protein, 10 aa, Homo Sapiens
IFQELVEGVF

SEQ ID NO: 161224 - protein, 10 aa, Homo Sapiens
IWPNARISVM

SEQ ID NO: 161225 - protein, 10 aa, Homo Sapiens
IYFAPMADSL

SEQ ID NO: 161226 - protein, 10 aa, Homo Sapiens
IYFDHDLQSY

SEQ ID NO: 161227 - protein, 10 aa, Homo Sapiens
IYLPGRPTSM

SEQ ID NO: 161228 - protein, 10 aa, Homo Sapiens
IYMEPEKQVM

SEQ ID NO: 161229 - protein, 10 aa, Homo Sapiens
IYPGYHQSSY

SEQ ID NO: 161230 - protein, 10 aa, Homo Sapiens
IYQEGWRTVF

SEQ ID NO: 161231 - protein, 10 aa, Homo Sapiens
IYTDYRPTPL

SEQ ID NO: 161232 - protein, 10 aa, Homo Sapiens
IYYTGKYQSL

SEQ ID NO: 161233 - protein, 10 aa, Homo Sapiens
KYYDEIINAL

SEQ ID NO: 161234 - protein, 10 aa, Homo Sapiens
KYYDKLFKEY

SEQ ID NO: 161235 - protein, 10 aa, Homo Sapiens
KYYDKNAIAI

SEQ ID NO: 161236 - protein, 10 aa, Homo Sapiens
LFPEGPARAF

SEQ ID NO: 161237 - protein, 10 aa, Homo Sapiens
LFPELPKSAL

SEQ ID NO: 161238 - protein, 10 aa, Homo Sapiens
LFPEPEHSSF

SEQ ID NO: 161239 - protein, 10 aa, Homo Sapiens
LFPEYKNNKL

SEQ ID NO: 161240 - protein, 10 aa, Homo Sapiens
LYPENIVPSF

SEQ ID NO: 161241 - protein, 10 aa, Homo Sapiens
LYPEVPPEEF

SEQ ID NO: 161242 - protein, 10 aa, Homo Sapiens
MFPEHAVKAY

SEQ ID NO: 161243 - protein, 10 aa, Homo Sapiens
MMPPMGGPPM

SEQ ID NO: 161244 - protein, 10 aa, Homo Sapiens
MYKYPSDISY

SEQ ID NO: 161245 - protein, 10 aa, Homo Sapiens
NFPEHIFPAL

SEQ ID NO: 161246 - protein, 10 aa, Homo Sapiens
NFYEGHITSL

SEQ ID NO: 161247 - protein, 10 aa, Homo Sapiens
NFYGDLRKAL

SEQ ID NO: 161248 - protein, 10 aa, Homo Sapiens
NYIDLPVLAI

SEQ ID NO: 161249 - protein, 10 aa, Homo Sapiens
NYIDRFLSSM

SEQ ID NO: 161250 - protein, 10 aa, Homo Sapiens
NYYDLVRTEI

SEQ ID NO: 161251 - protein, 10 aa, Homo Sapiens
NYYNKVSTVF

SEQ ID NO: 161252 - protein, 10 aa, Homo Sapiens
NYYPYTITEY

SEQ ID NO: 161253 - protein, 10 aa, Homo Sapiens
PEVKFNWYVD

SEQ ID NO: 161254 - protein, 10 aa, Homo Sapiens
QFYDNKGITY

SEQ ID NO: 161255 - protein, 10 aa, Homo Sapiens
QYYIFIPSKF

SEQ ID NO: 161256 - protein, 10 aa, Homo Sapiens
QYYNGKIHAY

SEQ ID NO: 161257 - protein, 10 aa, Homo Sapiens
RFFDTNTSVL

SEQ ID NO: 161258 - protein, 10 aa, Homo Sapiens
RFIDDVVSAV

SEQ ID NO: 161259 - protein, 10 aa, Homo Sapiens
RFIDISPAEM

SEQ ID NO: 161260 - protein, 10 aa, Homo Sapiens
RFPDQPFIAL

SEQ ID NO: 161261 - protein, 10 aa, Homo Sapiens
RFPEELTQTF

SEQ ID NO: 161262 - protein, 10 aa, Homo Sapiens
RFPGQLNADL

SEQ ID NO: 161263 - protein, 10 aa, Homo Sapiens
RFPNFTNQLL

SEQ ID NO: 161264 - protein, 10 aa, Homo Sapiens
RFQEADSPTL

SEQ ID NO: 161265 - protein, 10 aa, Homo Sapiens
RFVEVGRVAY

SEQ ID NO: 161266 - protein, 10 aa, Homo Sapiens
RLMVHTVATF

SEQ ID NO: 161267 - protein, 10 aa, Homo Sapiens
RSNFGYNIPL

SEQ ID NO: 161268 - protein, 10 aa, Homo Sapiens
RYIMGSGESF

SEQ ID NO: 161269 - protein, 10 aa, Homo Sapiens
RYMELYTHVY

SEQ ID NO: 161270 - protein, 10 aa, Homo Sapiens
RYPDIQASYL

SEQ ID NO: 161271 - protein, 10 aa, Homo Sapiens
RYPGYMNNDL

SEQ ID NO: 161272 - protein, 10 aa, Homo Sapiens
SFFDNISSEL

SEQ ID NO: 161273 - protein, 10 aa, Homo Sapiens
SFFGETSHNY

SEQ ID NO: 161274 - protein, 10 aa, Homo Sapiens
SFMQHDVQEL

SEQ ID NO: 161275 - protein, 10 aa, Homo Sapiens
SFPDDATSPL

SEQ ID NO: 161276 - protein, 10 aa, Homo Sapiens
SFPEHRVLSF

SEQ ID NO: 161277 - protein, 10 aa, Homo Sapiens
SFPKYKPSSL

SEQ ID NO: 161278 - protein, 10 aa, Homo Sapiens
SFYEKGPLTF

SEQ ID NO: 161279 - protein, 10 aa, Homo Sapiens
SFYNLLTRTF

SEQ ID NO: 161280 - protein, 10 aa, Homo Sapiens
SFYPEEVSSM

SEQ ID NO: 161281 - protein, 10 aa, Homo Sapiens
SFYTAIAQAF

SEQ ID NO: 161282 - protein, 10 aa, Homo Sapiens
SWPTYPQLYV

SEQ ID NO: 161283 - protein, 10 aa, Homo Sapiens
SYFDAIPVTM

SEQ ID NO: 161284 - protein, 10 aa, Homo Sapiens
SYFDRYRDSF

SEQ ID NO: 161285 - protein, 10 aa, Homo Sapiens
SYFEIPTKEF

SEQ ID NO: 161286 - protein, 10 aa, Homo Sapiens
SYFEKETLTF

SEQ ID NO: 161287 - protein, 10 aa, Homo Sapiens
SYFEKGPLTF

SEQ ID NO: 161288 - protein, 10 aa, Homo Sapiens
SYIDRLISVF

SEQ ID NO: 161289 - protein, 10 aa, Homo Sapiens
SYPAAVPQAL

SEQ ID NO: 161290 - protein, 10 aa, Homo Sapiens
SYQIPTENSM

SEQ ID NO: 161291 - protein, 10 aa, Homo Sapiens
SYQSYQSPTM

SEQ ID NO: 161292 - protein, 10 aa, Homo Sapiens
SYVNLPTIAL

SEQ ID NO: 161293 - protein, 10 aa, Homo Sapiens
SYYGNRAATL

SEQ ID NO: 161294 - protein, 10 aa, Homo Sapiens
TYIGYLPLAH

SEQ ID NO: 161295 - protein, 10 aa, Homo Sapiens
TYLETKGAAL

SEQ ID NO: 161296 - protein, 10 aa, Homo Sapiens
TYPEFLANAL

SEQ ID NO: 161297 - protein, 10 aa, Homo Sapiens
VFINVPTVSF

SEQ ID NO: 161298 - protein, 10 aa, Homo Sapiens
VFITDKISSF

SEQ ID NO: 161299 - protein, 10 aa, Homo Sapiens
VFMPHVTEAY

SEQ ID NO: 161300 - protein, 10 aa, Homo Sapiens
VFPPLTQRTY

SEQ ID NO: 161301 - protein, 10 aa, Homo Sapiens
VFYPGETVVH

SEQ ID NO: 161302 - protein, 10 aa, Homo Sapiens
VLPHQPLATY

SEQ ID NO: 161303 - protein, 10 aa, Homo Sapiens
VYFAERVTSL

SEQ ID NO: 161304 - protein, 10 aa, Homo Sapiens
VYFHTLTSEY

SEQ ID NO: 161305 - protein, 10 aa, Homo Sapiens
VYIGYLPLAH

SEQ ID NO: 161306 - protein, 10 aa, Homo Sapiens
VYMTEPIDEY

SEQ ID NO: 161307 - protein, 10 aa, Homo Sapiens
VYPNFRPTPK

SEQ ID NO: 161308 - protein, 10 aa, Homo Sapiens
VYYVGVASCL

SEQ ID NO: 161309 - protein, 10 aa, Homo Sapiens
YFADRLYDSM

SEQ ID NO: 161310 - protein, 10 aa, Homo Sapiens
YFFDNDSKSF

SEQ ID NO: 161311 - protein, 10 aa, Homo Sapiens
YFHDGVRVAA

SEQ ID NO: 161312 - protein, 10 aa, Homo Sapiens
YFHDRVASFY

SEQ ID NO: 161313 - protein, 10 aa, Homo Sapiens
YFIAPSGHGL

SEQ ID NO: 161314 - protein, 10 aa, Homo Sapiens
YFIAPTGHSL

SEQ ID NO: 161315 - protein, 10 aa, Homo Sapiens
YFINGDISSL

SEQ ID NO: 161316 - protein, 10 aa, Homo Sapiens
YFIPATGHSL

SEQ ID NO: 161317 - protein, 10 aa, Homo Sapiens
YFIPFLPLEY

SEQ ID NO: 161318 - protein, 10 aa, Homo Sapiens
YFISHVLAFF

SEQ ID NO: 161319 - protein, 10 aa, Homo Sapiens
YFISPTGHSL

SEQ ID NO: 161320 - protein, 10 aa, Homo Sapiens
YFITPTGHSL

SEQ ID NO: 161321 - protein, 10 aa, Homo Sapiens
YFLDKAAEQL

SEQ ID NO: 161322 - protein, 10 aa, Homo Sapiens
YFPDYSIGNL

SEQ ID NO: 161323 - protein, 10 aa, Homo Sapiens
YFPEEKFESL

SEQ ID NO: 161324 - protein, 10 aa, Homo Sapiens
YFPEMQILAV

SEQ ID NO: 161325 - protein, 10 aa, Homo Sapiens
YFYDDVTTLY

SEQ ID NO: 161326 - protein, 10 aa, Homo Sapiens
YFYDPDVGNF

SEQ ID NO: 161327 - protein, 10 aa, Homo Sapiens
YFYDRRRIYL

SEQ ID NO: 161328 - protein, 10 aa, Homo Sapiens
YFYPFPVPPL

SEQ ID NO: 161329 - protein, 10 aa, Homo Sapiens
YFYPYGLQTF

SEQ ID NO: 161330 - protein, 10 aa, Homo Sapiens
YLPDFRFTPF

SEQ ID NO: 161331 - protein, 10 aa, Homo Sapiens
YLPENQVLPH

SEQ ID NO: 161332 - protein, 10 aa, Homo Sapiens
YLPNQLFRTF

SEQ ID NO: 161333 - protein, 10 aa, Homo Sapiens
YMIDPSGVSY

SEQ ID NO: 161334 - protein, 10 aa, Homo Sapiens
YWPEGKRVAM

SEQ ID NO: 161335 - protein, 10 aa, Homo Sapiens
YWPHQPIENL

SEQ ID NO: 161336 - protein, 10 aa, Homo Sapiens
YWPTYTPMEV

SEQ ID NO: 161337 - protein, 10 aa, Homo Sapiens
YWPTYVPMEV

SEQ ID NO: 161338 - protein, 10 aa, Homo Sapiens
YYDPLAGTYY

SEQ ID NO: 161339 - protein, 10 aa, Homo Sapiens
YYFDRDDVAL

SEQ ID NO: 161340 - protein, 10 aa, Homo Sapiens
YYFEGIKQTF

SEQ ID NO: 161341 - protein, 10 aa, Homo Sapiens
YYFNRKTFSF

SEQ ID NO: 161342 - protein, 10 aa, Homo Sapiens
YYIDDVFHAL

SEQ ID NO: 161343 - protein, 10 aa, Homo Sapiens
YYINYTTIEL

SEQ ID NO: 161344 - protein, 10 aa, Homo Sapiens
YYIPEITSVL

SEQ ID NO: 161345 - protein, 10 aa, Homo Sapiens
YYIQNGIQSF

SEQ ID NO: 161346 - protein, 10 aa, Homo Sapiens
YYLQHPPISF

SEQ ID NO: 161347 - protein, 10 aa, Homo Sapiens
YYLQIHPQEL

SEQ ID NO: 161348 - protein, 10 aa, Homo Sapiens
YYPAQGVQQF

SEQ ID NO: 161349 - protein, 10 aa, Homo Sapiens
YYPPSQIAQL

SEQ ID NO: 161350 - protein, 10 aa, Homo Sapiens
YYRYPTGESY

SEQ ID NO: 161351 - protein, 10 aa, Homo Sapiens
YYVDTAVRHV

SEQ ID NO: 161352 - protein, 10 aa, Homo Sapiens
YYYDGDIGNY

SEQ ID NO: 161353 - protein, 10 aa, Homo Sapiens
YYYDGDVGNY

SEQ ID NO: 161354 - protein, 10 aa, Homo Sapiens
YYYDPLAGTY

SEQ ID NO: 161355 - protein, 10 aa, Homo Sapiens
YYYDPQTGLY

SEQ ID NO: 161356 - protein, 10 aa, Homo Sapiens
YYYDPTTGLY

SEQ ID NO: 161357 - protein, 10 aa, Homo Sapiens
YYYDTHTNTY

SEQ ID NO: 161358 - protein, 10 aa, Homo Sapiens
YYYHARVYEF

SEQ ID NO: 161359 - protein, 10 aa, Homo Sapiens
YYYNGKAVYA

SEQ ID NO: 161360 - protein, 11 aa, Homo Sapiens
APTHGSILIEC

SEQ ID NO: 161361 - protein, 11 aa, Homo Sapiens
AYMELQQKAEF

SEQ ID NO: 161362 - protein, 11 aa, Homo Sapiens
AYYPAQGVQQF

SEQ ID NO: 161363 - protein, 11 aa, Homo Sapiens
FYIDPYKLLPL

SEQ ID NO: 161364 - protein, 11 aa, Homo Sapiens
FYNTAQSPSAL

SEQ ID NO: 161365 - protein, 11 aa, Homo Sapiens
FYQDTFGQQWK

SEQ ID NO: 161366 - protein, 11 aa, Homo Sapiens
FYVDSDMVNEF

SEQ ID NO: 161367 - protein, 11 aa, Homo Sapiens
FYYLGSGRETF

SEQ ID NO: 161368 - protein, 11 aa, Homo Sapiens
FYYNTSEQNVM

SEQ ID NO: 161369 - protein, 11 aa, Homo Sapiens
HFIQAGLLSAL

SEQ ID NO: 161370 - protein, 11 aa, Homo Sapiens
HYMNPYQLNAY

SEQ ID NO: 161371 - protein, 11 aa, Homo Sapiens
IECLPTSGHLS

SEQ ID NO: 161372 - protein, 11 aa, Homo Sapiens
IFFFGTHETAF

SEQ ID NO: 161373 - protein, 11 aa, Homo Sapiens
IYALNENVSSF

SEQ ID NO: 161374 - protein, 11 aa, Homo Sapiens
IYIDRHVMQPY

SEQ ID NO: 161375 - protein, 11 aa, Homo Sapiens
IYMERAEDLPL

SEQ ID NO: 161376 - protein, 11 aa, Homo Sapiens
KYMPSVKVSVF

SEQ ID NO: 161377 - protein, 11 aa, Homo Sapiens
KYPKGAGRVAF

SEQ ID NO: 161378 - protein, 11 aa, Homo Sapiens
NYPDYMPSNIF

SEQ ID NO: 161379 - protein, 11 aa, Homo Sapiens
RDPNHGLYPKP

SEQ ID NO: 161380 - protein, 11 aa, Homo Sapiens
RYINPAKLTPY

SEQ ID NO: 161381 - protein, 11 aa, Homo Sapiens
SFFDATDRVSF

SEQ ID NO: 161382 - protein, 11 aa, Homo Sapiens
SFPTTKTYFPH

SEQ ID NO: 161383 - protein, 11 aa, Homo Sapiens
SYIFPSSISAM

SEQ ID NO: 161384 - protein, 11 aa, Homo Sapiens
SYYGPLNLLTF

SEQ ID NO: 161385 - protein, 11 aa, Homo Sapiens
SYYPAENLIEY

SEQ ID NO: 161386 - protein, 11 aa, Homo Sapiens
TYMPSVSLQSL

SEQ ID NO: 161387 - protein, 11 aa, Homo Sapiens
VFQEPSLLSSL

SEQ ID NO: 161388 - protein, 11 aa, Homo Sapiens
VYFKGKWKTPF

SEQ ID NO: 161389 - protein, 11 aa, Homo Sapiens
VYQSLCPTSWV

SEQ ID NO: 161390 - protein, 11 aa, Homo Sapiens
YFYDVEALRDY

SEQ ID NO: 161391 - protein, 11 aa, Homo Sapiens
YYALCGFGGVL

SEQ ID NO: 161392 - protein, 11 aa, Homo Sapiens
YYDGDIGNYYY

SEQ ID NO: 161393 - protein, 11 aa, Homo Sapiens
YYDGDVGNYYY

SEQ ID NO: 161394 - protein, 11 aa, Homo Sapiens
YYFAQQNSGHF

SEQ ID NO: 161395 - protein, 11 aa, Homo Sapiens
YYFDAAEAEAW

SEQ ID NO: 161396 - protein, 11 aa, Homo Sapiens
YYFDNVSSTEL

SEQ ID NO: 161397 - protein, 11 aa, Homo Sapiens
YYIDADLLREI

SEQ ID NO: 161398 - protein, 11 aa, Homo Sapiens
YYIGDIHPSDL

SEQ ID NO: 161399 - protein, 11 aa, Homo Sapiens
YYIPGQGRSTY

SEQ ID NO: 161400 - protein, 11 aa, Homo Sapiens
YYITNDTVQTY

SEQ ID NO: 161401 - protein, 11 aa, Homo Sapiens
YYLNEQGDRVY

SEQ ID NO: 161402 - protein, 11 aa, Homo Sapiens
YYPGFNPFRAY

SEQ ID NO: 161403 - protein, 11 aa, Homo Sapiens
YYYDGDIGNYY

SEQ ID NO: 161404 - protein, 11 aa, Homo Sapiens
YYYDPLAGTYY

SEQ ID NO: 161405 - protein, 11 aa, Homo Sapiens
YYYDPQEEVYL

SEQ ID NO: 161406 - protein, 11 aa, Homo Sapiens
YYYDPQTGLYY

SEQ ID NO: 161407 - protein, 11 aa, Homo Sapiens
YYYDPTTGLYY

SEQ ID NO: 161408 - protein, 11 aa, Homo Sapiens
YYYDTHTNTYY

SEQ ID NO: 161409 - protein, 8 aa, Homo Sapiens
AFFTGQIF

SEQ ID NO: 161410 - protein, 8 aa, Homo Sapiens
AFFTSKAL

SEQ ID NO: 161411 - protein, 8 aa, Homo Sapiens
AFGTRDAL

SEQ ID NO: 161412 - protein, 8 aa, Homo Sapiens
AFGVGSEL

SEQ ID NO: 161413 - protein, 8 aa, Homo Sapiens
AFHTASVL

SEQ ID NO: 161414 - protein, 8 aa, Homo Sapiens
AFIERLEM

SEQ ID NO: 161415 - protein, 8 aa, Homo Sapiens
AFKNRMEV

SEQ ID NO: 161416 - protein, 8 aa, Homo Sapiens
AFLCGRAL

SEQ ID NO: 161417 - protein, 8 aa, Homo Sapiens
AFLNNQEY

SEQ ID NO: 161418 - protein, 8 aa, Homo Sapiens
AFLTGVGL

SEQ ID NO: 161419 - protein, 8 aa, Homo Sapiens
AFMAAESL

SEQ ID NO: 161420 - protein, 8 aa, Homo Sapiens
AFMEGIAL

SEQ ID NO: 161421 - protein, 8 aa, Homo Sapiens
AFNIAEAF

SEQ ID NO: 161422 - protein, 8 aa, Homo Sapiens
AFNISSNL

SEQ ID NO: 161423 - protein, 8 aa, Homo Sapiens
AFNVSSHL

SEQ ID NO: 161424 - protein, 8 aa, Homo Sapiens
AFQAALAL

SEQ ID NO: 161425 - protein, 8 aa, Homo Sapiens
AFQISKEY

SEQ ID NO: 161426 - protein, 8 aa, Homo Sapiens
AFQNVLTH

SEQ ID NO: 161427 - protein, 8 aa, Homo Sapiens
AFSVRSSL

SEQ ID NO: 161428 - protein, 8 aa, Homo Sapiens
AFTNRIFF

SEQ ID NO: 161429 - protein, 8 aa, Homo Sapiens
ATAEGALK

SEQ ID NO: 161430 - protein, 8 aa, Homo Sapiens
ATQVGIEW

SEQ ID NO: 161431 - protein, 8 aa, Homo Sapiens
AYFDVKEY

SEQ ID NO: 161432 - protein, 8 aa, Homo Sapiens
AYFEGHHL

SEQ ID NO: 161433 - protein, 8 aa, Homo Sapiens
AYFTAAQL

SEQ ID NO: 161434 - protein, 8 aa, Homo Sapiens
AYFTHSNL

SEQ ID NO: 161435 - protein, 8 aa, Homo Sapiens
AYGKGTYF

SEQ ID NO: 161436 - protein, 8 aa, Homo Sapiens
AYGLSREV

SEQ ID NO: 161437 - protein, 8 aa, Homo Sapiens
AYLEALSH

SEQ ID NO: 161438 - protein, 8 aa, Homo Sapiens
AYLIVKEL

SEQ ID NO: 161439 - protein, 8 aa, Homo Sapiens
AYLNVVGM

SEQ ID NO: 161440 - protein, 8 aa, Homo Sapiens
AYLQRIAL

SEQ ID NO: 161441 - protein, 8 aa, Homo Sapiens
AYLVRWEY

SEQ ID NO: 161442 - protein, 8 aa, Homo Sapiens
AYMNHIMV

SEQ ID NO: 161443 - protein, 8 aa, Homo Sapiens
AYNLHSAY

SEQ ID NO: 161444 - protein, 8 aa, Homo Sapiens
AYQDRLAY

SEQ ID NO: 161445 - protein, 8 aa, Homo Sapiens
AYQIAEQF

SEQ ID NO: 161446 - protein, 8 aa, Homo Sapiens
AYQLAFRY

SEQ ID NO: 161447 - protein, 8 aa, Homo Sapiens
AYQLGSVY

SEQ ID NO: 161448 - protein, 8 aa, Homo Sapiens
AYQSVRIL

SEQ ID NO: 161449 - protein, 8 aa, Homo Sapiens
AYQVGAVL

SEQ ID NO: 161450 - protein, 8 aa, Homo Sapiens
AYQYQNIF

SEQ ID NO: 161451 - protein, 8 aa, Homo Sapiens
AYSIRGQL

SEQ ID NO: 161452 - protein, 8 aa, Homo Sapiens
AYVSGLSF

SEQ ID NO: 161453 - protein, 8 aa, Homo Sapiens
AYYAGHVL

SEQ ID NO: 161454 - protein, 8 aa, Homo Sapiens
CSGTVEVR

SEQ ID NO: 161455 - protein, 8 aa, Homo Sapiens
DFFNGKEL

SEQ ID NO: 161456 - protein, 8 aa, Homo Sapiens
FFANHPDL

SEQ ID NO: 161457 - protein, 8 aa, Homo Sapiens
FFAVRESL

SEQ ID NO: 161458 - protein, 8 aa, Homo Sapiens
FFENHPYF

SEQ ID NO: 161459 - protein, 8 aa, Homo Sapiens
FFESFGDL

SEQ ID NO: 161460 - protein, 8 aa, Homo Sapiens
FFEVRRVV

SEQ ID NO: 161461 - protein, 8 aa, Homo Sapiens
FFFAGYYL

SEQ ID NO: 161462 - protein, 8 aa, Homo Sapiens
FFFNGQHM

SEQ ID NO: 161463 - protein, 8 aa, Homo Sapiens
FFFYGKSL

SEQ ID NO: 161464 - protein, 8 aa, Homo Sapiens
FFHNGRYL

SEQ ID NO: 161465 - protein, 8 aa, Homo Sapiens
FFKDGLEM

SEQ ID NO: 161466 - protein, 8 aa, Homo Sapiens
FFKDRNWL

SEQ ID NO: 161467 - protein, 8 aa, Homo Sapiens
FFLAAKEL

SEQ ID NO: 161468 - protein, 8 aa, Homo Sapiens
FFLEALDF

SEQ ID NO: 161469 - protein, 8 aa, Homo Sapiens
FFLESIAM

SEQ ID NO: 161470 - protein, 8 aa, Homo Sapiens
FFLIGPPL

SEQ ID NO: 161471 - protein, 8 aa, Homo Sapiens
FFLLGKTL

SEQ ID NO: 161472 - protein, 8 aa, Homo Sapiens
FFLPAAAF

SEQ ID NO: 161473 - protein, 8 aa, Homo Sapiens
FFLPKGAY

SEQ ID NO: 161474 - protein, 8 aa, Homo Sapiens
FFLSHPAY

SEQ ID NO: 161475 - protein, 8 aa, Homo Sapiens
FFLVSREL

SEQ ID NO: 161476 - protein, 8 aa, Homo Sapiens
FFLVVDAY

SEQ ID NO: 161477 - protein, 8 aa, Homo Sapiens
FFPSGIDF

SEQ ID NO: 161478 - protein, 8 aa, Homo Sapiens
FFQEAVSH

SEQ ID NO: 161479 - protein, 8 aa, Homo Sapiens
FFQRVRAL

SEQ ID NO: 161480 - protein, 8 aa, Homo Sapiens
FFQVGSDL

SEQ ID NO: 161481 - protein, 8 aa, Homo Sapiens
FFRVVSEY

SEQ ID NO: 161482 - protein, 8 aa, Homo Sapiens
FFVPHGYL

SEQ ID NO: 161483 - protein, 8 aa, Homo Sapiens
FFWPGIDL

SEQ ID NO: 161484 - protein, 8 aa, Homo Sapiens
FFYGHSAF

SEQ ID NO: 161485 - protein, 8 aa, Homo Sapiens
FSPVGSVL

SEQ ID NO: 161486 - protein, 8 aa, Homo Sapiens
FTADPLSL

SEQ ID NO: 161487 - protein, 8 aa, Homo Sapiens
FTMVGKTF

SEQ ID NO: 161488 - protein, 8 aa, Homo Sapiens
FYAFGRVF

SEQ ID NO: 161489 - protein, 8 aa, Homo Sapiens
FYCPGSAL

SEQ ID NO: 161490 - protein, 8 aa, Homo Sapiens
FYFAAEHL

SEQ ID NO: 161491 - protein, 8 aa, Homo Sapiens
FYFEGTFY

SEQ ID NO: 161492 - protein, 8 aa, Homo Sapiens
FYFNTKYF

SEQ ID NO: 161493 - protein, 8 aa, Homo Sapiens
FYFPAAYY

SEQ ID NO: 161494 - protein, 8 aa, Homo Sapiens
FYFPHYEV

SEQ ID NO: 161495 - protein, 8 aa, Homo Sapiens
FYGFQIAM

SEQ ID NO: 161496 - protein, 8 aa, Homo Sapiens
FYGKAIEL

SEQ ID NO: 161497 - protein, 8 aa, Homo Sapiens
FYGRHAEL

SEQ ID NO: 161498 - protein, 8 aa, Homo Sapiens
FYHISLEH

SEQ ID NO: 161499 - protein, 8 aa, Homo Sapiens
FYHPAQEY

SEQ ID NO: 161500 - protein, 8 aa, Homo Sapiens
FYHSVQDL

SEQ ID NO: 161501 - protein, 8 aa, Homo Sapiens
FYIESISY

SEQ ID NO: 161502 - protein, 8 aa, Homo Sapiens
FYINKLCF

SEQ ID NO: 161503 - protein, 8 aa, Homo Sapiens
FYIVGLIL

SEQ ID NO: 161504 - protein, 8 aa, Homo Sapiens
FYKDVLEV

SEQ ID NO: 161505 - protein, 8 aa, Homo Sapiens
FYLERSNL

SEQ ID NO: 161506 - protein, 8 aa, Homo Sapiens
FYLNALEW

SEQ ID NO: 161507 - protein, 8 aa, Homo Sapiens
FYLSGTYY

SEQ ID NO: 161508 - protein, 8 aa, Homo Sapiens
FYMIGSEV

SEQ ID NO: 161509 - protein, 8 aa, Homo Sapiens
FYNAGLAY

SEQ ID NO: 161510 - protein, 8 aa, Homo Sapiens
FYNITLAF

SEQ ID NO: 161511 - protein, 8 aa, Homo Sapiens
FYNPVQEF

SEQ ID NO: 161512 - protein, 8 aa, Homo Sapiens
FYQEHPDL

SEQ ID NO: 161513 - protein, 8 aa, Homo Sapiens
FYQFVNNL

SEQ ID NO: 161514 - protein, 8 aa, Homo Sapiens
FYQLQPAM

SEQ ID NO: 161515 - protein, 8 aa, Homo Sapiens
FYQLSHFL

SEQ ID NO: 161516 - protein, 8 aa, Homo Sapiens
FYQNHRRY

SEQ ID NO: 161517 - protein, 8 aa, Homo Sapiens
FYQTAEEL

SEQ ID NO: 161518 - protein, 8 aa, Homo Sapiens
FYQVGILY

SEQ ID NO: 161519 - protein, 8 aa, Homo Sapiens
FYSFQDKL

SEQ ID NO: 161520 - protein, 8 aa, Homo Sapiens
FYSVNVDY

SEQ ID NO: 161521 - protein, 8 aa, Homo Sapiens
FYTIHSCF

SEQ ID NO: 161522 - protein, 8 aa, Homo Sapiens
FYVEHPEV

SEQ ID NO: 161523 - protein, 8 aa, Homo Sapiens
FYVIGSSY

SEQ ID NO: 161524 - protein, 8 aa, Homo Sapiens
FYVNGLTL

SEQ ID NO: 161525 - protein, 8 aa, Homo Sapiens
FYVVAESF

SEQ ID NO: 161526 - protein, 8 aa, Homo Sapiens
FYVVNSEL

SEQ ID NO: 161527 - protein, 8 aa, Homo Sapiens
FYYDGKVM

SEQ ID NO: 161528 - protein, 8 aa, Homo Sapiens
FYYFVKEF

SEQ ID NO: 161529 - protein, 8 aa, Homo Sapiens
FYYFVSAL

SEQ ID NO: 161530 - protein, 8 aa, Homo Sapiens
GGLRAELL

SEQ ID NO: 161531 - protein, 8 aa, Homo Sapiens
HFGIHEEM

SEQ ID NO: 161532 - protein, 8 aa, Homo Sapiens
HFLEHMVF

SEQ ID NO: 161533 - protein, 8 aa, Homo Sapiens
HFLLGSIY

SEQ ID NO: 161534 - protein, 8 aa, Homo Sapiens
HFQVVKCL

SEQ ID NO: 161535 - protein, 8 aa, Homo Sapiens
HYINGSLF

SEQ ID NO: 161536 - protein, 8 aa, Homo Sapiens
HYLYVRAH

SEQ ID NO: 161537 - protein, 8 aa, Homo Sapiens
HYNCISAL

SEQ ID NO: 161538 - protein, 8 aa, Homo Sapiens
HYNLQNAF

SEQ ID NO: 161539 - protein, 8 aa, Homo Sapiens
HYNNIMAL

SEQ ID NO: 161540 - protein, 8 aa, Homo Sapiens
HYNTGWVL

SEQ ID NO: 161541 - protein, 8 aa, Homo Sapiens
HYQDVSCL

SEQ ID NO: 161542 - protein, 8 aa, Homo Sapiens
HYQLGLAY

SEQ ID NO: 161543 - protein, 8 aa, Homo Sapiens
HYQNALYL

SEQ ID NO: 161544 - protein, 8 aa, Homo Sapiens
HYYNAISV

SEQ ID NO: 161545 - protein, 8 aa, Homo Sapiens
IDRFLSSM

SEQ ID NO: 161546 - protein, 8 aa, Homo Sapiens
IFASGSEL

SEQ ID NO: 161547 - protein, 8 aa, Homo Sapiens
IFATVREL

SEQ ID NO: 161548 - protein, 8 aa, Homo Sapiens
IFFNVHSA

SEQ ID NO: 161549 - protein, 8 aa, Homo Sapiens
IFIARSQM

SEQ ID NO: 161550 - protein, 8 aa, Homo Sapiens
IFLGVSTV

SEQ ID NO: 161551 - protein, 8 aa, Homo Sapiens
IFLSASEL

SEQ ID NO: 161552 - protein, 8 aa, Homo Sapiens
IFLVATSF

SEQ ID NO: 161553 - protein, 8 aa, Homo Sapiens
IFNNSSHF

SEQ ID NO: 161554 - protein, 8 aa, Homo Sapiens
IFNVSQQM

SEQ ID NO: 161555 - protein, 8 aa, Homo Sapiens
IFQPVAEL

SEQ ID NO: 161556 - protein, 8 aa, Homo Sapiens
IFQVAQEL

SEQ ID NO: 161557 - protein, 8 aa, Homo Sapiens
IFSEHSCL

SEQ ID NO: 161558 - protein, 8 aa, Homo Sapiens
IFTMGIAL

SEQ ID NO: 161559 - protein, 8 aa, Homo Sapiens
IFYLGEAL

SEQ ID NO: 161560 - protein, 8 aa, Homo Sapiens
INKPPIAK

SEQ ID NO: 161561 - protein, 8 aa, Homo Sapiens
IYAIRNLT

SEQ ID NO: 161562 - protein, 8 aa, Homo Sapiens
IYAIRQSI

SEQ ID NO: 161563 - protein, 8 aa, Homo Sapiens
IYDNRIVL

SEQ ID NO: 161564 - protein, 8 aa, Homo Sapiens
IYFLGHIF

SEQ ID NO: 161565 - protein, 8 aa, Homo Sapiens
IYFLGNSL

SEQ ID NO: 161566 - protein, 8 aa, Homo Sapiens
IYHAVAAL

SEQ ID NO: 161567 - protein, 8 aa, Homo Sapiens
IYHISLEY

SEQ ID NO: 161568 - protein, 8 aa, Homo Sapiens
IYHTIAYL

SEQ ID NO: 161569 - protein, 8 aa, Homo Sapiens
IYHVIMSV

SEQ ID NO: 161570 - protein, 8 aa, Homo Sapiens
IYIDRHVM

SEQ ID NO: 161571 - protein, 8 aa, Homo Sapiens
IYITGSSI

SEQ ID NO: 161572 - protein, 8 aa, Homo Sapiens
IYIVHDEV

SEQ ID NO: 161573 - protein, 8 aa, Homo Sapiens
IYKIGQGY

SEQ ID NO: 161574 - protein, 8 aa, Homo Sapiens
IYLEGSAF

SEQ ID NO: 161575 - protein, 8 aa, Homo Sapiens
IYLNGESL

SEQ ID NO: 161576 - protein, 8 aa, Homo Sapiens
IYLNVESV

SEQ ID NO: 161577 - protein, 8 aa, Homo Sapiens
IYLTADNL

SEQ ID NO: 161578 - protein, 8 aa, Homo Sapiens
IYMESLAL

SEQ ID NO: 161579 - protein, 8 aa, Homo Sapiens
IYMVHIQV

SEQ ID NO: 161580 - protein, 8 aa, Homo Sapiens
IYNIGTNF

SEQ ID NO: 161581 - protein, 8 aa, Homo Sapiens
IYNTAGFY

SEQ ID NO: 161582 - protein, 8 aa, Homo Sapiens
IYPLVGTM

SEQ ID NO: 161583 - protein, 8 aa, Homo Sapiens
IYQLQDVF

SEQ ID NO: 161584 - protein, 8 aa, Homo Sapiens
IYQSASVF

SEQ ID NO: 161585 - protein, 8 aa, Homo Sapiens
IYQWINEL

SEQ ID NO: 161586 - protein, 8 aa, Homo Sapiens
IYTLGRYL

SEQ ID NO: 161587 - protein, 8 aa, Homo Sapiens
IYTVGKRF

SEQ ID NO: 161588 - protein, 8 aa, Homo Sapiens
IYVNYPTF

SEQ ID NO: 161589 - protein, 8 aa, Homo Sapiens
IYVVGGAM

SEQ ID NO: 161590 - protein, 8 aa, Homo Sapiens
KFFTGDVF

SEQ ID NO: 161591 - protein, 8 aa, Homo Sapiens
KFMDASAL

SEQ ID NO: 161592 - protein, 8 aa, Homo Sapiens
KFQIGDYL

SEQ ID NO: 161593 - protein, 8 aa, Homo Sapiens
KYFIRDEF

SEQ ID NO: 161594 - protein, 8 aa, Homo Sapiens
KYLTAEAF

SEQ ID NO: 161595 - protein, 8 aa, Homo Sapiens
KYLTSLNY

SEQ ID NO: 161596 - protein, 8 aa, Homo Sapiens
KYMNNITY

SEQ ID NO: 161597 - protein, 8 aa, Homo Sapiens
LFFVGNQL

SEQ ID NO: 161598 - protein, 8 aa, Homo Sapiens
LFGTFSCL

SEQ ID NO: 161599 - protein, 8 aa, Homo Sapiens
LFHFGNCF

SEQ ID NO: 161600 - protein, 8 aa, Homo Sapiens
LFHIGVAF

SEQ ID NO: 161601 - protein, 8 aa, Homo Sapiens
LFINTSSY

SEQ ID NO: 161602 - protein, 8 aa, Homo Sapiens
LFLEGMHY

SEQ ID NO: 161603 - protein, 8 aa, Homo Sapiens
LFLTGESY

SEQ ID NO: 161604 - protein, 8 aa, Homo Sapiens
LFNLGSAY

SEQ ID NO: 161605 - protein, 8 aa, Homo Sapiens
LFNVAHTL

SEQ ID NO: 161606 - protein, 8 aa, Homo Sapiens
LFNVGNKL

SEQ ID NO: 161607 - protein, 8 aa, Homo Sapiens
LFQEAEEF

SEQ ID NO: 161608 - protein, 8 aa, Homo Sapiens
LFQEVRCM

SEQ ID NO: 161609 - protein, 8 aa, Homo Sapiens
LFQNGSVL

SEQ ID NO: 161610 - protein, 8 aa, Homo Sapiens
LFQNIRPL

SEQ ID NO: 161611 - protein, 8 aa, Homo Sapiens
LFQSRISL

SEQ ID NO: 161612 - protein, 8 aa, Homo Sapiens
LFRVITEV

SEQ ID NO: 161613 - protein, 8 aa, Homo Sapiens
LFTFRPAL

SEQ ID NO: 161614 - protein, 8 aa, Homo Sapiens
LFVPRPVL

SEQ ID NO: 161615 - protein, 8 aa, Homo Sapiens
LFYFRVPF

SEQ ID NO: 161616 - protein, 8 aa, Homo Sapiens
LLHQAGEI

SEQ ID NO: 161617 - protein, 8 aa, Homo Sapiens
LYFTGEAI

SEQ ID NO: 161618 - protein, 8 aa, Homo Sapiens
LYITGAAL

SEQ ID NO: 161619 - protein, 8 aa, Homo Sapiens
LYLDGHVF

SEQ ID NO: 161620 - protein, 8 aa, Homo Sapiens
LYLIARVM

SEQ ID NO: 161621 - protein, 8 aa, Homo Sapiens
LYLLRLAL

SEQ ID NO: 161622 - protein, 8 aa, Homo Sapiens
LYLNRTSL

SEQ ID NO: 161623 - protein, 8 aa, Homo Sapiens
LYLTGGVW

SEQ ID NO: 161624 - protein, 8 aa, Homo Sapiens
LYMVRTML

SEQ ID NO: 161625 - protein, 8 aa, Homo Sapiens
LYMVSKEL

SEQ ID NO: 161626 - protein, 8 aa, Homo Sapiens
LYNIAFMY

SEQ ID NO: 161627 - protein, 8 aa, Homo Sapiens
LYNIGLTY

SEQ ID NO: 161628 - protein, 8 aa, Homo Sapiens
LYNIGNVY

SEQ ID NO: 161629 - protein, 8 aa, Homo Sapiens
LYQNTRSY

SEQ ID NO: 161630 - protein, 8 aa, Homo Sapiens
LYQTALHL

SEQ ID NO: 161631 - protein, 8 aa, Homo Sapiens
LYQTINSL

SEQ ID NO: 161632 - protein, 8 aa, Homo Sapiens
LYQTVTGL

SEQ ID NO: 161633 - protein, 8 aa, Homo Sapiens
LYQVGKEF

SEQ ID NO: 161634 - protein, 8 aa, Homo Sapiens
LYSTHAAL

SEQ ID NO: 161635 - protein, 8 aa, Homo Sapiens
LYYPGSNL

SEQ ID NO: 161636 - protein, 8 aa, Homo Sapiens
MFLTRSEY

SEQ ID NO: 161637 - protein, 8 aa, Homo Sapiens
MFNIHRGF

SEQ ID NO: 161638 - protein, 8 aa, Homo Sapiens
MFNNANVL

SEQ ID NO: 161639 - protein, 8 aa, Homo Sapiens
MYFIVRSL

SEQ ID NO: 161640 - protein, 8 aa, Homo Sapiens
MYFVIAAM

SEQ ID NO: 161641 - protein, 8 aa, Homo Sapiens
MYKVGPVL

SEQ ID NO: 161642 - protein, 8 aa, Homo Sapiens
MYTVAMAY

SEQ ID NO: 161643 - protein, 8 aa, Homo Sapiens
NFAYRLEL

SEQ ID NO: 161644 - protein, 8 aa, Homo Sapiens
NFFEGKEL

SEQ ID NO: 161645 - protein, 8 aa, Homo Sapiens
NFFTGCPK

SEQ ID NO: 161646 - protein, 8 aa, Homo Sapiens
NFLNRTSL

SEQ ID NO: 161647 - protein, 8 aa, Homo Sapiens
NFLVSEAL

SEQ ID NO: 161648 - protein, 8 aa, Homo Sapiens
NFNWGRVV

SEQ ID NO: 161649 - protein, 8 aa, Homo Sapiens
NFSIHMAL

SEQ ID NO: 161650 - protein, 8 aa, Homo Sapiens
NVDYFFNF

SEQ ID NO: 161651 - protein, 8 aa, Homo Sapiens
NVPVGKVL

SEQ ID NO: 161652 - protein, 8 aa, Homo Sapiens
NYHFGVTY

SEQ ID NO: 161653 - protein, 8 aa, Homo Sapiens
NYLFGCEL

SEQ ID NO: 161654 - protein, 8 aa, Homo Sapiens
NYLTRIHY

SEQ ID NO: 161655 - protein, 8 aa, Homo Sapiens
NYLVVAAM

SEQ ID NO: 161656 - protein, 8 aa, Homo Sapiens
NYMMGIEF

SEQ ID NO: 161657 - protein, 8 aa, Homo Sapiens
NYVNGKTF

SEQ ID NO: 161658 - protein, 8 aa, Homo Sapiens
NYYVRAVL

SEQ ID NO: 161659 - protein, 8 aa, Homo Sapiens
QFQFGHAL

SEQ ID NO: 161660 - protein, 8 aa, Homo Sapiens
QFRNAPPF

SEQ ID NO: 161661 - protein, 8 aa, Homo Sapiens
QFTTRSEL

SEQ ID NO: 161662 - protein, 8 aa, Homo Sapiens
QYMERLQL

SEQ ID NO: 161663 - protein, 8 aa, Homo Sapiens
QYYVGQSF

SEQ ID NO: 161664 - protein, 8 aa, Homo Sapiens
RFINGSAL

SEQ ID NO: 161665 - protein, 8 aa, Homo Sapiens
RFNVAKSL

SEQ ID NO: 161666 - protein, 8 aa, Homo Sapiens
RFQSSAVM

SEQ ID NO: 161667 - protein, 8 aa, Homo Sapiens
RYFISHVL

SEQ ID NO: 161668 - protein, 8 aa, Homo Sapiens
RYFTVTCY

SEQ ID NO: 161669 - protein, 8 aa, Homo Sapiens
RYHIAKVY

SEQ ID NO: 161670 - protein, 8 aa, Homo Sapiens
RYLVRAIL

SEQ ID NO: 161671 - protein, 8 aa, Homo Sapiens
RYMFSRPF

SEQ ID NO: 161672 - protein, 8 aa, Homo Sapiens
RYNLQSAL

SEQ ID NO: 161673 - protein, 8 aa, Homo Sapiens
RYQEALHL

SEQ ID NO: 161674 - protein, 8 aa, Homo Sapiens
RYQVGVHY

SEQ ID NO: 161675 - protein, 8 aa, Homo Sapiens
RYQVSWSL

SEQ ID NO: 161676 - protein, 8 aa, Homo Sapiens
SFFLGKEL

SEQ ID NO: 161677 - protein, 8 aa, Homo Sapiens
SFGARAEL

SEQ ID NO: 161678 - protein, 8 aa, Homo Sapiens
SFHVGLQL

SEQ ID NO: 161679 - protein, 8 aa, Homo Sapiens
SFLTAAHM

SEQ ID NO: 161680 - protein, 8 aa, Homo Sapiens
SFMINNVY

SEQ ID NO: 161681 - protein, 8 aa, Homo Sapiens
SFQEVREY

SEQ ID NO: 161682 - protein, 8 aa, Homo Sapiens
SFVDVMEF

SEQ ID NO: 161683 - protein, 8 aa, Homo Sapiens
SFYNGLSF

SEQ ID NO: 161684 - protein, 8 aa, Homo Sapiens
SYAVGHFL

SEQ ID NO: 161685 - protein, 8 aa, Homo Sapiens
SYGLNIEM

SEQ ID NO: 161686 - protein, 8 aa, Homo Sapiens
SYLVGSHM

SEQ ID NO: 161687 - protein, 8 aa, Homo Sapiens
SYMISVNM

SEQ ID NO: 161688 - protein, 8 aa, Homo Sapiens
SYNIGRAW

SEQ ID NO: 161689 - protein, 8 aa, Homo Sapiens
SYNISEVM

SEQ ID NO: 161690 - protein, 8 aa, Homo Sapiens
SYQVASTL

SEQ ID NO: 161691 - protein, 8 aa, Homo Sapiens
SYSVGVAY

SEQ ID NO: 161692 - protein, 8 aa, Homo Sapiens
SYTIQSEL

SEQ ID NO: 161693 - protein, 8 aa, Homo Sapiens
SYWNHREL

SEQ ID NO: 161694 - protein, 8 aa, Homo Sapiens
SYYSVAEL

SEQ ID NO: 161695 - protein, 8 aa, Homo Sapiens
TFLNHPAL

SEQ ID NO: 161696 - protein, 8 aa, Homo Sapiens
TFLVISHY

SEQ ID NO: 161697 - protein, 8 aa, Homo Sapiens
TFMNRVEV

SEQ ID NO: 161698 - protein, 8 aa, Homo Sapiens
TFNNGLCY

SEQ ID NO: 161699 - protein, 8 aa, Homo Sapiens
TFTNHMVF

SEQ ID NO: 161700 - protein, 8 aa, Homo Sapiens
TYFAHDAL

SEQ ID NO: 161701 - protein, 8 aa, Homo Sapiens
TYKEALEK

SEQ ID NO: 161702 - protein, 8 aa, Homo Sapiens
TYLNISQV

SEQ ID NO: 161703 - protein, 8 aa, Homo Sapiens
TYLTGDQF

SEQ ID NO: 161704 - protein, 8 aa, Homo Sapiens
TYLVAFAY

SEQ ID NO: 161705 - protein, 8 aa, Homo Sapiens
TYLVGNSL

SEQ ID NO: 161706 - protein, 8 aa, Homo Sapiens
TYSLGSAL

SEQ ID NO: 161707 - protein, 8 aa, Homo Sapiens
TYTTRIHL

SEQ ID NO: 161708 - protein, 8 aa, Homo Sapiens
VFFCHGEL

SEQ ID NO: 161709 - protein, 8 aa, Homo Sapiens
VFFVAHSY

SEQ ID NO: 161710 - protein, 8 aa, Homo Sapiens
VFFVGQSA

SEQ ID NO: 161711 - protein, 8 aa, Homo Sapiens
VFFVHEGY

SEQ ID NO: 161712 - protein, 8 aa, Homo Sapiens
VFHAGTAL

SEQ ID NO: 161713 - protein, 8 aa, Homo Sapiens
VFHPRQEL

SEQ ID NO: 161714 - protein, 8 aa, Homo Sapiens
VFIQRSEL

SEQ ID NO: 161715 - protein, 8 aa, Homo Sapiens
VFITKPPM

SEQ ID NO: 161716 - protein, 8 aa, Homo Sapiens
VFLAGIAL

SEQ ID NO: 161717 - protein, 8 aa, Homo Sapiens
VFLCARPR

SEQ ID NO: 161718 - protein, 8 aa, Homo Sapiens
VFLDHNAL

SEQ ID NO: 161719 - protein, 8 aa, Homo Sapiens
VFLLGHSM

SEQ ID NO: 161720 - protein, 8 aa, Homo Sapiens
VFLLGKVM

SEQ ID NO: 161721 - protein, 8 aa, Homo Sapiens
VFLNGNKL

SEQ ID NO: 161722 - protein, 8 aa, Homo Sapiens
VFMTHLEF

SEQ ID NO: 161723 - protein, 8 aa, Homo Sapiens
VFNAVTSF

SEQ ID NO: 161724 - protein, 8 aa, Homo Sapiens
VFNPAKEL

SEQ ID NO: 161725 - protein, 8 aa, Homo Sapiens
VFNTTSYL

SEQ ID NO: 161726 - protein, 8 aa, Homo Sapiens
VFQFKVDY

SEQ ID NO: 161727 - protein, 8 aa, Homo Sapiens
VFQLGKKY

SEQ ID NO: 161728 - protein, 8 aa, Homo Sapiens
VFQPVAEL

SEQ ID NO: 161729 - protein, 8 aa, Homo Sapiens
VFQSVKSL

SEQ ID NO: 161730 - protein, 8 aa, Homo Sapiens
VFQTMVQM

SEQ ID NO: 161731 - protein, 8 aa, Homo Sapiens
VFRNAASF

SEQ ID NO: 161732 - protein, 8 aa, Homo Sapiens
VFRVGISF

SEQ ID NO: 161733 - protein, 8 aa, Homo Sapiens
VFRVGSVL

SEQ ID NO: 161734 - protein, 8 aa, Homo Sapiens
VFRVSSSL

SEQ ID NO: 161735 - protein, 8 aa, Homo Sapiens
VFSIGPVF

SEQ ID NO: 161736 - protein, 8 aa, Homo Sapiens
VFSLSSEF

SEQ ID NO: 161737 - protein, 8 aa, Homo Sapiens
VFSVTIHM

SEQ ID NO: 161738 - protein, 8 aa, Homo Sapiens
VFTNAEVY

SEQ ID NO: 161739 - protein, 8 aa, Homo Sapiens
VFTNRTVL

SEQ ID NO: 161740 - protein, 8 aa, Homo Sapiens
VFTTRNLL

SEQ ID NO: 161741 - protein, 8 aa, Homo Sapiens
VFVTVKEL

SEQ ID NO: 161742 - protein, 8 aa, Homo Sapiens
VFVVGESY

SEQ ID NO: 161743 - protein, 8 aa, Homo Sapiens
VFVVGTER

SEQ ID NO: 161744 - protein, 8 aa, Homo Sapiens
VYEIGRQF

SEQ ID NO: 161745 - protein, 8 aa, Homo Sapiens
VYFCHLDI

SEQ ID NO: 161746 - protein, 8 aa, Homo Sapiens
VYFEGSDF

SEQ ID NO: 161747 - protein, 8 aa, Homo Sapiens
VYFEGSIY

SEQ ID NO: 161748 - protein, 8 aa, Homo Sapiens
VYFIVREV

SEQ ID NO: 161749 - protein, 8 aa, Homo Sapiens
VYFVHPTF

SEQ ID NO: 161750 - protein, 8 aa, Homo Sapiens
VYFVVTVY

SEQ ID NO: 161751 - protein, 8 aa, Homo Sapiens
VYHAVSVM

SEQ ID NO: 161752 - protein, 8 aa, Homo Sapiens
VYITGKEV

SEQ ID NO: 161753 - protein, 8 aa, Homo Sapiens
VYITRAQL

SEQ ID NO: 161754 - protein, 8 aa, Homo Sapiens
VYKVGIAF

SEQ ID NO: 161755 - protein, 8 aa, Homo Sapiens
VYLFTEAY

SEQ ID NO: 161756 - protein, 8 aa, Homo Sapiens
VYLNVMEL

SEQ ID NO: 161757 - protein, 8 aa, Homo Sapiens
VYLPTREY

SEQ ID NO: 161758 - protein, 8 aa, Homo Sapiens
VYLTGYNF

SEQ ID NO: 161759 - protein, 8 aa, Homo Sapiens
VYLTHLDY

SEQ ID NO: 161760 - protein, 8 aa, Homo Sapiens
VYLVHDEL

SEQ ID NO: 161761 - protein, 8 aa, Homo Sapiens
VYLVIRAL

SEQ ID NO: 161762 - protein, 8 aa, Homo Sapiens
VYLVSAML

SEQ ID NO: 161763 - protein, 8 aa, Homo Sapiens
VYLVTEVY

SEQ ID NO: 161764 - protein, 8 aa, Homo Sapiens
VYMIRVYL

SEQ ID NO: 161765 - protein, 8 aa, Homo Sapiens
VYMLAASL

SEQ ID NO: 161766 - protein, 8 aa, Homo Sapiens
VYMTGKEL

SEQ ID NO: 161767 - protein, 8 aa, Homo Sapiens
VYNIHLAV

SEQ ID NO: 161768 - protein, 8 aa, Homo Sapiens
VYNNSRML

SEQ ID NO: 161769 - protein, 8 aa, Homo Sapiens
VYQARPQL

SEQ ID NO: 161770 - protein, 8 aa, Homo Sapiens
VYQAVLSL

SEQ ID NO: 161771 - protein, 8 aa, Homo Sapiens
VYQAVQAL

SEQ ID NO: 161772 - protein, 8 aa, Homo Sapiens
VYQAVRQF

SEQ ID NO: 161773 - protein, 8 aa, Homo Sapiens
VYQETSEM

SEQ ID NO: 161774 - protein, 8 aa, Homo Sapiens
VYQLRFQF

SEQ ID NO: 161775 - protein, 8 aa, Homo Sapiens
VYSTGLAM

SEQ ID NO: 161776 - protein, 8 aa, Homo Sapiens
VYTLTSLY

SEQ ID NO: 161777 - protein, 8 aa, Homo Sapiens
VYVNTAHL

SEQ ID NO: 161778 - protein, 8 aa, Homo Sapiens
VYVVHDSL

SEQ ID NO: 161779 - protein, 8 aa, Homo Sapiens
WFNTHREL

SEQ ID NO: 161780 - protein, 8 aa, Homo Sapiens
YAAIQIFL

SEQ ID NO: 161781 - protein, 8 aa, Homo Sapiens
YFDEHYEY

SEQ ID NO: 161782 - protein, 8 aa, Homo Sapiens
YFFAVSTL

SEQ ID NO: 161783 - protein, 8 aa, Homo Sapiens
YFFPRADL

SEQ ID NO: 161784 - protein, 8 aa, Homo Sapiens
YFGARAIL

SEQ ID NO: 161785 - protein, 8 aa, Homo Sapiens
YFGSFSSL

SEQ ID NO: 161786 - protein, 8 aa, Homo Sapiens
YFIPNKEF

SEQ ID NO: 161787 - protein, 8 aa, Homo Sapiens
YFKGAIPL

SEQ ID NO: 161788 - protein, 8 aa, Homo Sapiens
YFLEHLAF

SEQ ID NO: 161789 - protein, 8 aa, Homo Sapiens
YFLIGKVY

SEQ ID NO: 161790 - protein, 8 aa, Homo Sapiens
YFLLARCF

SEQ ID NO: 161791 - protein, 8 aa, Homo Sapiens
YFLQRHEL

SEQ ID NO: 161792 - protein, 8 aa, Homo Sapiens
YFMVGTAF

SEQ ID NO: 161793 - protein, 8 aa, Homo Sapiens
YFNEGTVL

SEQ ID NO: 161794 - protein, 8 aa, Homo Sapiens
YFNFGNQL

SEQ ID NO: 161795 - protein, 8 aa, Homo Sapiens
YFQLHRAL

SEQ ID NO: 161796 - protein, 8 aa, Homo Sapiens
YFQVAKTV

SEQ ID NO: 161797 - protein, 8 aa, Homo Sapiens
YFSPFRPY

SEQ ID NO: 161798 - protein, 8 aa, Homo Sapiens
YFSSRPAL

SEQ ID NO: 161799 - protein, 8 aa, Homo Sapiens
YFYNYPAV

SEQ ID NO: 161800 - protein, 8 aa, Homo Sapiens
YVHMVTHF

SEQ ID NO: 161801 - protein, 8 aa, Homo Sapiens
YWQNHPEL

SEQ ID NO: 161802 - protein, 8 aa, Homo Sapiens
YWVPRNAL

SEQ ID NO: 161803 - protein, 8 aa, Homo Sapiens
YYASFLEV

SEQ ID NO: 161804 - protein, 8 aa, Homo Sapiens
YYCVRGTI

SEQ ID NO: 161805 - protein, 8 aa, Homo Sapiens
YYENRMYL

SEQ ID NO: 161806 - protein, 8 aa, Homo Sapiens
YYEVHKEL

SEQ ID NO: 161807 - protein, 8 aa, Homo Sapiens
YYFAVDTM

SEQ ID NO: 161808 - protein, 8 aa, Homo Sapiens
YYFLGRML

SEQ ID NO: 161809 - protein, 8 aa, Homo Sapiens
YYFNQHIF

SEQ ID NO: 161810 - protein, 8 aa, Homo Sapiens
YYFNRKTF

SEQ ID NO: 161811 - protein, 8 aa, Homo Sapiens
YYFPVREL

SEQ ID NO: 161812 - protein, 8 aa, Homo Sapiens
YYFSAHAL

SEQ ID NO: 161813 - protein, 8 aa, Homo Sapiens
YYFSVDNL

SEQ ID NO: 161814 - protein, 8 aa, Homo Sapiens
YYGLSNFY

SEQ ID NO: 161815 - protein, 8 aa, Homo Sapiens
YYHCAVTL

SEQ ID NO: 161816 - protein, 8 aa, Homo Sapiens
YYHWALSF

SEQ ID NO: 161817 - protein, 8 aa, Homo Sapiens
YYILRPEV

SEQ ID NO: 161818 - protein, 8 aa, Homo Sapiens
YYINSPEL

SEQ ID NO: 161819 - protein, 8 aa, Homo Sapiens
YYITRAKL

SEQ ID NO: 161820 - protein, 8 aa, Homo Sapiens
YYKPGLLM

SEQ ID NO: 161821 - protein, 8 aa, Homo Sapiens
YYLISRSL

SEQ ID NO: 161822 - protein, 8 aa, Homo Sapiens
YYLWVKSV

SEQ ID NO: 161823 - protein, 8 aa, Homo Sapiens
YYNANRAF

SEQ ID NO: 161824 - protein, 8 aa, Homo Sapiens
YYNTAVKL

SEQ ID NO: 161825 - protein, 8 aa, Homo Sapiens
YYQFINEL

SEQ ID NO: 161826 - protein, 8 aa, Homo Sapiens
YYQLSEEL

SEQ ID NO: 161827 - protein, 8 aa, Homo Sapiens
YYQPGLLY

SEQ ID NO: 161828 - protein, 8 aa, Homo Sapiens
YYSITINY

SEQ ID NO: 161829 - protein, 8 aa, Homo Sapiens
YYSVAKAL

SEQ ID NO: 161830 - protein, 8 aa, Homo Sapiens
YYTVAHAI

SEQ ID NO: 161831 - protein, 8 aa, Homo Sapiens
YYVNRDTL

SEQ ID NO: 161832 - protein, 8 aa, Homo Sapiens
YYYVGFAY

SEQ ID NO: 161833 - protein, 8 aa, Homo Sapiens
YYYYHRQY

SEQ ID NO: 161834 - protein, 9 aa, Homo Sapiens
AFACMGQTY

SEQ ID NO: 161835 - protein, 9 aa, Homo Sapiens
AFADHVECL

SEQ ID NO: 161836 - protein, 9 aa, Homo Sapiens
AFADIIHSL

SEQ ID NO: 161837 - protein, 9 aa, Homo Sapiens
AFADNVSGL

SEQ ID NO: 161838 - protein, 9 aa, Homo Sapiens
AFADYVSTM

SEQ ID NO: 161839 - protein, 9 aa, Homo Sapiens
AFAHHGRSL

SEQ ID NO: 161840 - protein, 9 aa, Homo Sapiens
AFALKALQF

SEQ ID NO: 161841 - protein, 9 aa, Homo Sapiens
AFALLFSEL

SEQ ID NO: 161842 - protein, 9 aa, Homo Sapiens
AFALVSQAY

SEQ ID NO: 161843 - protein, 9 aa, Homo Sapiens
AFATPTISL

SEQ ID NO: 161844 - protein, 9 aa, Homo Sapiens
AFDNMVTSM

SEQ ID NO: 161845 - protein, 9 aa, Homo Sapiens
AFEDYVQSM

SEQ ID NO: 161846 - protein, 9 aa, Homo Sapiens
AFEFMQRAL

SEQ ID NO: 161847 - protein, 9 aa, Homo Sapiens
AFFAAPNSI

SEQ ID NO: 161848 - protein, 9 aa, Homo Sapiens
AFFEAASMM

SEQ ID NO: 161849 - protein, 9 aa, Homo Sapiens
AFFGGSNPF

SEQ ID NO: 161850 - protein, 9 aa, Homo Sapiens
AFGAALEAF

SEQ ID NO: 161851 - protein, 9 aa, Homo Sapiens
AFGGLTRAL

SEQ ID NO: 161852 - protein, 9 aa, Homo Sapiens
AFHDNLRSL

SEQ ID NO: 161853 - protein, 9 aa, Homo Sapiens
AFHLRVLAH

SEQ ID NO: 161854 - protein, 9 aa, Homo Sapiens
AFHVCITSY

SEQ ID NO: 161855 - protein, 9 aa, Homo Sapiens
AFIAQALCL

SEQ ID NO: 161856 - protein, 9 aa, Homo Sapiens
AFIDQSQSL

SEQ ID NO: 161857 - protein, 9 aa, Homo Sapiens
AFIDTAQHM

SEQ ID NO: 161858 - protein, 9 aa, Homo Sapiens
AFIEESRQL

SEQ ID NO: 161859 - protein, 9 aa, Homo Sapiens
AFIETPSSL

SEQ ID NO: 161860 - protein, 9 aa, Homo Sapiens
AFIFLIHCL

SEQ ID NO: 161861 - protein, 9 aa, Homo Sapiens
AFIFRSLNL

SEQ ID NO: 161862 - protein, 9 aa, Homo Sapiens
AFIGVASNF

SEQ ID NO: 161863 - protein, 9 aa, Homo Sapiens
AFIHISTAY

SEQ ID NO: 161864 - protein, 9 aa, Homo Sapiens
AFIITGQTY

SEQ ID NO: 161865 - protein, 9 aa, Homo Sapiens
AFIITINSF

SEQ ID NO: 161866 - protein, 9 aa, Homo Sapiens
AFIPHSIVL

SEQ ID NO: 161867 - protein, 9 aa, Homo Sapiens
AFIQEAAAF

SEQ ID NO: 161868 - protein, 9 aa, Homo Sapiens
AFIQQNISF

SEQ ID NO: 161869 - protein, 9 aa, Homo Sapiens
AFISKVSTH

SEQ ID NO: 161870 - protein, 9 aa, Homo Sapiens
AFISLAKTL

SEQ ID NO: 161871 - protein, 9 aa, Homo Sapiens
AFIYDAAVL

SEQ ID NO: 161872 - protein, 9 aa, Homo Sapiens
AFKAIGTAY

SEQ ID NO: 161873 - protein, 9 aa, Homo Sapiens
AFKEVGIEF

SEQ ID NO: 161874 - protein, 9 aa, Homo Sapiens
AFLAEASVM

SEQ ID NO: 161875 - protein, 9 aa, Homo Sapiens
AFLAIIHAL

SEQ ID NO: 161876 - protein, 9 aa, Homo Sapiens
AFLEAADNL

SEQ ID NO: 161877 - protein, 9 aa, Homo Sapiens
AFLEARQSL

SEQ ID NO: 161878 - protein, 9 aa, Homo Sapiens
AFLEQAVSY

SEQ ID NO: 161879 - protein, 9 aa, Homo Sapiens
AFLGEANVM

SEQ ID NO: 161880 - protein, 9 aa, Homo Sapiens
AFLKTALEM

SEQ ID NO: 161881 - protein, 9 aa, Homo Sapiens
AFLPTLQTL

SEQ ID NO: 161882 - protein, 9 aa, Homo Sapiens
AFLTQSSQL

SEQ ID NO: 161883 - protein, 9 aa, Homo Sapiens
AFLTQTVCL

SEQ ID NO: 161884 - protein, 9 aa, Homo Sapiens
AFLTSGTQF

SEQ ID NO: 161885 - protein, 9 aa, Homo Sapiens
AFLVQISAH

SEQ ID NO: 161886 - protein, 9 aa, Homo Sapiens
AFMDQVRAF

SEQ ID NO: 161887 - protein, 9 aa, Homo Sapiens
AFMEKVRVL

SEQ ID NO: 161888 - protein, 9 aa, Homo Sapiens
AFMSQVHSV

SEQ ID NO: 161889 - protein, 9 aa, Homo Sapiens
AFNTQVTAL

SEQ ID NO: 161890 - protein, 9 aa, Homo Sapiens
AFNTTVAAL

SEQ ID NO: 161891 - protein, 9 aa, Homo Sapiens
AFNVMGEQF

SEQ ID NO: 161892 - protein, 9 aa, Homo Sapiens
AFPDGRSSF

SEQ ID NO: 161893 - protein, 9 aa, Homo Sapiens
AFPDSVNSL

SEQ ID NO: 161894 - protein, 9 aa, Homo Sapiens
AFPDYSTYL

SEQ ID NO: 161895 - protein, 9 aa, Homo Sapiens
AFPFNMQEL

SEQ ID NO: 161896 - protein, 9 aa, Homo Sapiens
AFPGASLYL

SEQ ID NO: 161897 - protein, 9 aa, Homo Sapiens
AFPGGAKEL

SEQ ID NO: 161898 - protein, 9 aa, Homo Sapiens
AFPIGSSGF

SEQ ID NO: 161899 - protein, 9 aa, Homo Sapiens
AFPKAVSVF

SEQ ID NO: 161900 - protein, 9 aa, Homo Sapiens
AFPKSITVF

SEQ ID NO: 161901 - protein, 9 aa, Homo Sapiens
AFPNLARVL

SEQ ID NO: 161902 - protein, 9 aa, Homo Sapiens
AFPYGNVAF

SEQ ID NO: 161903 - protein, 9 aa, Homo Sapiens
AFQAVTEFY

SEQ ID NO: 161904 - protein, 9 aa, Homo Sapiens
AFQERLNSY

SEQ ID NO: 161905 - protein, 9 aa, Homo Sapiens
AFQFFAEEY

SEQ ID NO: 161906 - protein, 9 aa, Homo Sapiens
AFQFSYTAV

SEQ ID NO: 161907 - protein, 9 aa, Homo Sapiens
AFQHVGKAF

SEQ ID NO: 161908 - protein, 9 aa, Homo Sapiens
AFQIMQEEL

SEQ ID NO: 161909 - protein, 9 aa, Homo Sapiens
AFQNAYLEL

SEQ ID NO: 161910 - protein, 9 aa, Homo Sapiens
AFQNDVYEW

SEQ ID NO: 161911 - protein, 9 aa, Homo Sapiens
AFQQQIQTL

SEQ ID NO: 161912 - protein, 9 aa, Homo Sapiens
AFQTILTEI

SEQ ID NO: 161913 - protein, 9 aa, Homo Sapiens
AFQTTISKY

SEQ ID NO: 161914 - protein, 9 aa, Homo Sapiens
AFQVLVKSL

SEQ ID NO: 161915 - protein, 9 aa, Homo Sapiens
AFQVSACAF

SEQ ID NO: 161916 - protein, 9 aa, Homo Sapiens
AFSQFVRPL

SEQ ID NO: 161917 - protein, 9 aa, Homo Sapiens
AFSSDTSFF

SEQ ID NO: 161918 - protein, 9 aa, Homo Sapiens
AFTDHVECL

SEQ ID NO: 161919 - protein, 9 aa, Homo Sapiens
AFTEKVSTF

SEQ ID NO: 161920 - protein, 9 aa, Homo Sapiens
AFTSHPQEL

SEQ ID NO: 161921 - protein, 9 aa, Homo Sapiens
AFVAKFMAL

SEQ ID NO: 161922 - protein, 9 aa, Homo Sapiens
AFVLSSNSL

SEQ ID NO: 161923 - protein, 9 aa, Homo Sapiens
AFYDPTHAW

SEQ ID NO: 161924 - protein, 9 aa, Homo Sapiens
AFYEHAQTY

SEQ ID NO: 161925 - protein, 9 aa, Homo Sapiens
AFYTLVREI

SEQ ID NO: 161926 - protein, 9 aa, Homo Sapiens
AFYTTDRVM

SEQ ID NO: 161927 - protein, 9 aa, Homo Sapiens
ASPVRLLSL

SEQ ID NO: 161928 - protein, 9 aa, Homo Sapiens
AVLASGATF

SEQ ID NO: 161929 - protein, 9 aa, Homo Sapiens
AVNIMHSSL

SEQ ID NO: 161930 - protein, 9 aa, Homo Sapiens
AWAEYVVEW

SEQ ID NO: 161931 - protein, 9 aa, Homo Sapiens
AWPEKRGEI

SEQ ID NO: 161932 - protein, 9 aa, Homo Sapiens
AWPGPLADM

SEQ ID NO: 161933 - protein, 9 aa, Homo Sapiens
AYADFYRNY

SEQ ID NO: 161934 - protein, 9 aa, Homo Sapiens
AYAIQVGSL

SEQ ID NO: 161935 - protein, 9 aa, Homo Sapiens
AYALAGVSF

SEQ ID NO: 161936 - protein, 9 aa, Homo Sapiens
AYALGATVL

SEQ ID NO: 161937 - protein, 9 aa, Homo Sapiens
AYALMAHAM

SEQ ID NO: 161938 - protein, 9 aa, Homo Sapiens
AYAPAAATV

SEQ ID NO: 161939 - protein, 9 aa, Homo Sapiens
AYEFMSQAF

SEQ ID NO: 161940 - protein, 9 aa, Homo Sapiens
AYFDAASEI

SEQ ID NO: 161941 - protein, 9 aa, Homo Sapiens
AYFELVSAL

SEQ ID NO: 161942 - protein, 9 aa, Homo Sapiens
AYFGTGFPH

SEQ ID NO: 161943 - protein, 9 aa, Homo Sapiens
AYFKKVLEK

SEQ ID NO: 161944 - protein, 9 aa, Homo Sapiens
AYFPDARDM

SEQ ID NO: 161945 - protein, 9 aa, Homo Sapiens
AYFPQIVSV

SEQ ID NO: 161946 - protein, 9 aa, Homo Sapiens
AYFPYFITY

SEQ ID NO: 161947 - protein, 9 aa, Homo Sapiens
AYFTETEKF

SEQ ID NO: 161948 - protein, 9 aa, Homo Sapiens
AYFTTPIFY

SEQ ID NO: 161949 - protein, 9 aa, Homo Sapiens
AYGASFLSF

SEQ ID NO: 161950 - protein, 9 aa, Homo Sapiens
AYGPPTRAV

SEQ ID NO: 161951 - protein, 9 aa, Homo Sapiens
AYGRMGLAL

SEQ ID NO: 161952 - protein, 9 aa, Homo Sapiens
AYHAVVLSY

SEQ ID NO: 161953 - protein, 9 aa, Homo Sapiens
AYHELAQVY

SEQ ID NO: 161954 - protein, 9 aa, Homo Sapiens
AYHGLTVPL

SEQ ID NO: 161955 - protein, 9 aa, Homo Sapiens
AYHNSVECL

SEQ ID NO: 161956 - protein, 9 aa, Homo Sapiens
AYHTQTTPL

SEQ ID NO: 161957 - protein, 9 aa, Homo Sapiens
AYIENAKQV

SEQ ID NO: 161958 - protein, 9 aa, Homo Sapiens
AYIFNSNVM

SEQ ID NO: 161959 - protein, 9 aa, Homo Sapiens
AYIGFIQSL

SEQ ID NO: 161960 - protein, 9 aa, Homo Sapiens
AYIGGICSL

SEQ ID NO: 161961 - protein, 9 aa, Homo Sapiens
AYIHCVSAF

SEQ ID NO: 161962 - protein, 9 aa, Homo Sapiens
AYIHLVADY

SEQ ID NO: 161963 - protein, 9 aa, Homo Sapiens
AYILDTLVF

SEQ ID NO: 161964 - protein, 9 aa, Homo Sapiens
AYIMKRMDM

SEQ ID NO: 161965 - protein, 9 aa, Homo Sapiens
AYINKVEEL

SEQ ID NO: 161966 - protein, 9 aa, Homo Sapiens
AYINRASLL

SEQ ID NO: 161967 - protein, 9 aa, Homo Sapiens
AYITQKVEF

SEQ ID NO: 161968 - protein, 9 aa, Homo Sapiens
AYKPPGFSL

SEQ ID NO: 161969 - protein, 9 aa, Homo Sapiens
AYLAALTQL

SEQ ID NO: 161970 - protein, 9 aa, Homo Sapiens
AYLALRISY

SEQ ID NO: 161971 - protein, 9 aa, Homo Sapiens
AYLEAHETF

SEQ ID NO: 161972 - protein, 9 aa, Homo Sapiens
AYLEALSHL

SEQ ID NO: 161973 - protein, 9 aa, Homo Sapiens
AYLEQLESL

SEQ ID NO: 161974 - protein, 9 aa, Homo Sapiens
AYLGSAIQL

SEQ ID NO: 161975 - protein, 9 aa, Homo Sapiens
AYLIMISAL

SEQ ID NO: 161976 - protein, 9 aa, Homo Sapiens
AYLNYKVCL

SEQ ID NO: 161977 - protein, 9 aa, Homo Sapiens
AYLPNGAAL

SEQ ID NO: 161978 - protein, 9 aa, Homo Sapiens
AYLPVNESF

SEQ ID NO: 161979 - protein, 9 aa, Homo Sapiens
AYLQSYLSY

SEQ ID NO: 161980 - protein, 9 aa, Homo Sapiens
AYLSKAMEI

SEQ ID NO: 161981 - protein, 9 aa, Homo Sapiens
AYLTLTSRM

SEQ ID NO: 161982 - protein, 9 aa, Homo Sapiens
AYLWTKQVL

SEQ ID NO: 161983 - protein, 9 aa, Homo Sapiens
AYMAAFNSI

SEQ ID NO: 161984 - protein, 9 aa, Homo Sapiens
AYMELVNNM

SEQ ID NO: 161985 - protein, 9 aa, Homo Sapiens
AYMKSLLSL

SEQ ID NO: 161986 - protein, 9 aa, Homo Sapiens
AYMPHTFFI

SEQ ID NO: 161987 - protein, 9 aa, Homo Sapiens
AYMPPTSEA

SEQ ID NO: 161988 - protein, 9 aa, Homo Sapiens
AYMSIMTQM

SEQ ID NO: 161989 - protein, 9 aa, Homo Sapiens
AYNAVVRYF

SEQ ID NO: 161990 - protein, 9 aa, Homo Sapiens
AYNFPVTAM

SEQ ID NO: 161991 - protein, 9 aa, Homo Sapiens
AYNNVKACL

SEQ ID NO: 161992 - protein, 9 aa, Homo Sapiens
AYNPMARDL

SEQ ID NO: 161993 - protein, 9 aa, Homo Sapiens
AYNYYTKAI

SEQ ID NO: 161994 - protein, 9 aa, Homo Sapiens
AYPEIVAVY

SEQ ID NO: 161995 - protein, 9 aa, Homo Sapiens
AYPEYLITF

SEQ ID NO: 161996 - protein, 9 aa, Homo Sapiens
AYPEYLITY

SEQ ID NO: 161997 - protein, 9 aa, Homo Sapiens
AYPHFMSIL

SEQ ID NO: 161998 - protein, 9 aa, Homo Sapiens
AYPHNLMTF

SEQ ID NO: 161999 - protein, 9 aa, Homo Sapiens
AYPLVGHAL

SEQ ID NO: 162000 - protein, 9 aa, Homo Sapiens
AYPPGVKEI

SEQ ID NO: 162001 - protein, 9 aa, Homo Sapiens
AYPVGGLCY

SEQ ID NO: 162002 - protein, 9 aa, Homo Sapiens
AYPYNFSNL

SEQ ID NO: 162003 - protein, 9 aa, Homo Sapiens
AYPYYASAF

SEQ ID NO: 162004 - protein, 9 aa, Homo Sapiens
AYQAKVLQL

SEQ ID NO: 162005 - protein, 9 aa, Homo Sapiens
AYQDRLAYL

SEQ ID NO: 162006 - protein, 9 aa, Homo Sapiens
AYQEAVRTL

SEQ ID NO: 162007 - protein, 9 aa, Homo Sapiens
AYQFFREAL

SEQ ID NO: 162008 - protein, 9 aa, Homo Sapiens
AYQGVLVEL

SEQ ID NO: 162009 - protein, 9 aa, Homo Sapiens
AYQLAGHSF

SEQ ID NO: 162010 - protein, 9 aa, Homo Sapiens
AYQLMTDVF

SEQ ID NO: 162011 - protein, 9 aa, Homo Sapiens
AYQLMVDVF

SEQ ID NO: 162012 - protein, 9 aa, Homo Sapiens
AYQQRVTAL

SEQ ID NO: 162013 - protein, 9 aa, Homo Sapiens
AYQSIQNYL

SEQ ID NO: 162014 - protein, 9 aa, Homo Sapiens
AYQVSVCAF

SEQ ID NO: 162015 - protein, 9 aa, Homo Sapiens
AYQYTIRAH

SEQ ID NO: 162016 - protein, 9 aa, Homo Sapiens
AYSDLFRSL

SEQ ID NO: 162017 - protein, 9 aa, Homo Sapiens
AYSHIYSSY

SEQ ID NO: 162018 - protein, 9 aa, Homo Sapiens
AYTLGVKQL

SEQ ID NO: 162019 - protein, 9 aa, Homo Sapiens
AYTPFHAVL

SEQ ID NO: 162020 - protein, 9 aa, Homo Sapiens
AYVDKYRHM

SEQ ID NO: 162021 - protein, 9 aa, Homo Sapiens
AYVDYKTVL

SEQ ID NO: 162022 - protein, 9 aa, Homo Sapiens
AYVHMVTHF

SEQ ID NO: 162023 - protein, 9 aa, Homo Sapiens
AYVPGFAHI

SEQ ID NO: 162024 - protein, 9 aa, Homo Sapiens
AYVPVSRAV

SEQ ID NO: 162025 - protein, 9 aa, Homo Sapiens
AYVSPRAPF

SEQ ID NO: 162026 - protein, 9 aa, Homo Sapiens
AYYEHRLQL

SEQ ID NO: 162027 - protein, 9 aa, Homo Sapiens
AYYEKGVAF

SEQ ID NO: 162028 - protein, 9 aa, Homo Sapiens
AYYERALQL

SEQ ID NO: 162029 - protein, 9 aa, Homo Sapiens
AYYFHLQTF

SEQ ID NO: 162030 - protein, 9 aa, Homo Sapiens
AYYGNISHF

SEQ ID NO: 162031 - protein, 9 aa, Homo Sapiens
AYYKKALEL

SEQ ID NO: 162032 - protein, 9 aa, Homo Sapiens
AYYPSSFPK

SEQ ID NO: 162033 - protein, 9 aa, Homo Sapiens
AYYQFINEL

SEQ ID NO: 162034 - protein, 9 aa, Homo Sapiens
AYYVSNEEL

SEQ ID NO: 162035 - protein, 9 aa, Homo Sapiens
AYYYSLQIY

SEQ ID NO: 162036 - protein, 9 aa, Homo Sapiens
CFFPNGNAF

SEQ ID NO: 162037 - protein, 9 aa, Homo Sapiens
CFNPMKSVL

SEQ ID NO: 162038 - protein, 9 aa, Homo Sapiens
CFRYYSSEY

SEQ ID NO: 162039 - protein, 9 aa, Homo Sapiens
CFYGFQIAM

SEQ ID NO: 162040 - protein, 9 aa, Homo Sapiens
CYQEGLRSL

SEQ ID NO: 162041 - protein, 9 aa, Homo Sapiens
EFNHYLTSM

SEQ ID NO: 162042 - protein, 9 aa, Homo Sapiens
EFPAAAREL

SEQ ID NO: 162043 - protein, 9 aa, Homo Sapiens
EWPPFVVTL

SEQ ID NO: 162044 - protein, 9 aa, Homo Sapiens
EYHIMSSCY

SEQ ID NO: 162045 - protein, 9 aa, Homo Sapiens
EYIPGTTSL

SEQ ID NO: 162046 - protein, 9 aa, Homo Sapiens
EYLEKALEY

SEQ ID NO: 162047 - protein, 9 aa, Homo Sapiens
FALNTKTSY

SEQ ID NO: 162048 - protein, 9 aa, Homo Sapiens
FAPYERRAM

SEQ ID NO: 162049 - protein, 9 aa, Homo Sapiens
FFAKQATEL

SEQ ID NO: 162050 - protein, 9 aa, Homo Sapiens
FFDEKLNSL

SEQ ID NO: 162051 - protein, 9 aa, Homo Sapiens
FFEDEKPAL

SEQ ID NO: 162052 - protein, 9 aa, Homo Sapiens
FFFAPASSY

SEQ ID NO: 162053 - protein, 9 aa, Homo Sapiens
FFFSLSSSL

SEQ ID NO: 162054 - protein, 9 aa, Homo Sapiens
FFFTARTSF

SEQ ID NO: 162055 - protein, 9 aa, Homo Sapiens
FFGTHETAF

SEQ ID NO: 162056 - protein, 9 aa, Homo Sapiens
FFHEYLVSV

SEQ ID NO: 162057 - protein, 9 aa, Homo Sapiens
FFHIQAQKL

SEQ ID NO: 162058 - protein, 9 aa, Homo Sapiens
FFHLVNSEM

SEQ ID NO: 162059 - protein, 9 aa, Homo Sapiens
FFHNVDVPF

SEQ ID NO: 162060 - protein, 9 aa, Homo Sapiens
FFHWVNNVL

SEQ ID NO: 162061 - protein, 9 aa, Homo Sapiens
FFHYAVDNL

SEQ ID NO: 162062 - protein, 9 aa, Homo Sapiens
FFIACVTSF

SEQ ID NO: 162063 - protein, 9 aa, Homo Sapiens
FFIAGRYEF

SEQ ID NO: 162064 - protein, 9 aa, Homo Sapiens
FFIDCMAAL

SEQ ID NO: 162065 - protein, 9 aa, Homo Sapiens
FFIDQANYF

SEQ ID NO: 162066 - protein, 9 aa, Homo Sapiens
FFIDSVLGL

SEQ ID NO: 162067 - protein, 9 aa, Homo Sapiens
FFINEAMEL

SEQ ID NO: 162068 - protein, 9 aa, Homo Sapiens
FFIPGVSVV

SEQ ID NO: 162069 - protein, 9 aa, Homo Sapiens
FFIQDQIAL

SEQ ID NO: 162070 - protein, 9 aa, Homo Sapiens
FFIRQGRSY

SEQ ID NO: 162071 - protein, 9 aa, Homo Sapiens
FFITLPLSL

SEQ ID NO: 162072 - protein, 9 aa, Homo Sapiens
FFKERVMEI

SEQ ID NO: 162073 - protein, 9 aa, Homo Sapiens
FFKLPGGEL

SEQ ID NO: 162074 - protein, 9 aa, Homo Sapiens
FFLARPTTF

SEQ ID NO: 162075 - protein, 9 aa, Homo Sapiens
FFLIVKTLY

SEQ ID NO: 162076 - protein, 9 aa, Homo Sapiens
FFLQKRLQL

SEQ ID NO: 162077 - protein, 9 aa, Homo Sapiens
FFLRMKCTL

SEQ ID NO: 162078 - protein, 9 aa, Homo Sapiens
FFLSHQTAL

SEQ ID NO: 162079 - protein, 9 aa, Homo Sapiens
FFLSKIRSH

SEQ ID NO: 162080 - protein, 9 aa, Homo Sapiens
FFLSQQASL

SEQ ID NO: 162081 - protein, 9 aa, Homo Sapiens
FFLVQTKEV

SEQ ID NO: 162082 - protein, 9 aa, Homo Sapiens
FFMEELNTY

SEQ ID NO: 162083 - protein, 9 aa, Homo Sapiens
FFMEKRAKY

SEQ ID NO: 162084 - protein, 9 aa, Homo Sapiens
FFMERSWSV

SEQ ID NO: 162085 - protein, 9 aa, Homo Sapiens
FFMLRSLSL

SEQ ID NO: 162086 - protein, 9 aa, Homo Sapiens
FFMPGFAPL

SEQ ID NO: 162087 - protein, 9 aa, Homo Sapiens
FFNAVMQNL

SEQ ID NO: 162088 - protein, 9 aa, Homo Sapiens
FFNDTTTAF

SEQ ID NO: 162089 - protein, 9 aa, Homo Sapiens
FFNGLRTEL

SEQ ID NO: 162090 - protein, 9 aa, Homo Sapiens
FFNLTVKEM

SEQ ID NO: 162091 - protein, 9 aa, Homo Sapiens
FFNNQIEEL

SEQ ID NO: 162092 - protein, 9 aa, Homo Sapiens
FFNNRIIAI

SEQ ID NO: 162093 - protein, 9 aa, Homo Sapiens
FFNSVRSVF

SEQ ID NO: 162094 - protein, 9 aa, Homo Sapiens
FFNYTVRTL

SEQ ID NO: 162095 - protein, 9 aa, Homo Sapiens
FFPALHESL

SEQ ID NO: 162096 - protein, 9 aa, Homo Sapiens
FFPDFIWTV

SEQ ID NO: 162097 - protein, 9 aa, Homo Sapiens
FFPEYTHQL

SEQ ID NO: 162098 - protein, 9 aa, Homo Sapiens
FFPFDTRQM

SEQ ID NO: 162099 - protein, 9 aa, Homo Sapiens
FFPFNPLDF

SEQ ID NO: 162100 - protein, 9 aa, Homo Sapiens
FFPGFPLAL

SEQ ID NO: 162101 - protein, 9 aa, Homo Sapiens
FFPIAGLEF

SEQ ID NO: 162102 - protein, 9 aa, Homo Sapiens
FFPKKLLEL

SEQ ID NO: 162103 - protein, 9 aa, Homo Sapiens
FFPLHPMMI

SEQ ID NO: 162104 - protein, 9 aa, Homo Sapiens
FFPMHFQAF

SEQ ID NO: 162105 - protein, 9 aa, Homo Sapiens
FFPPFVSCI

SEQ ID NO: 162106 - protein, 9 aa, Homo Sapiens
FFPSNVEQF

SEQ ID NO: 162107 - protein, 9 aa, Homo Sapiens
FFPTQGHDY

SEQ ID NO: 162108 - protein, 9 aa, Homo Sapiens
FFPVHFQEF

SEQ ID NO: 162109 - protein, 9 aa, Homo Sapiens
FFQDKARFY

SEQ ID NO: 162110 - protein, 9 aa, Homo Sapiens
FFQETNIPY

SEQ ID NO: 162111 - protein, 9 aa, Homo Sapiens
FFQFGGQSL

SEQ ID NO: 162112 - protein, 9 aa, Homo Sapiens
FFQNAFIFF

SEQ ID NO: 162113 - protein, 9 aa, Homo Sapiens
FFQPMAECL

SEQ ID NO: 162114 - protein, 9 aa, Homo Sapiens
FFQQTTTSF

SEQ ID NO: 162115 - protein, 9 aa, Homo Sapiens
FFSDSALCF

SEQ ID NO: 162116 - protein, 9 aa, Homo Sapiens
FFSEREASF

SEQ ID NO: 162117 - protein, 9 aa, Homo Sapiens
FFSEYEKLL

SEQ ID NO: 162118 - protein, 9 aa, Homo Sapiens
FFSPKVVSL

SEQ ID NO: 162119 - protein, 9 aa, Homo Sapiens
FFTARTSFF

SEQ ID NO: 162120 - protein, 9 aa, Homo Sapiens
FFTDNVPAL

SEQ ID NO: 162121 - protein, 9 aa, Homo Sapiens
FFTEQNLSY

SEQ ID NO: 162122 - protein, 9 aa, Homo Sapiens
FFTSKALNM

SEQ ID NO: 162123 - protein, 9 aa, Homo Sapiens
FFVENVSEL

SEQ ID NO: 162124 - protein, 9 aa, Homo Sapiens
FFVGYGVTL

SEQ ID NO: 162125 - protein, 9 aa, Homo Sapiens
FFVVMEHCL

SEQ ID NO: 162126 - protein, 9 aa, Homo Sapiens
FFWIQNVSL

SEQ ID NO: 162127 - protein, 9 aa, Homo Sapiens
FFWTARLAF

SEQ ID NO: 162128 - protein, 9 aa, Homo Sapiens
FFYEGSRVL

SEQ ID NO: 162129 - protein, 9 aa, Homo Sapiens
FFYEKISAW

SEQ ID NO: 162130 - protein, 9 aa, Homo Sapiens
FFYNAIKSY

SEQ ID NO: 162131 - protein, 9 aa, Homo Sapiens
FFYPGWKVL

SEQ ID NO: 162132 - protein, 9 aa, Homo Sapiens
FFYPLDFTF

SEQ ID NO: 162133 - protein, 9 aa, Homo Sapiens
FFYQRLVEF

SEQ ID NO: 162134 - protein, 9 aa, Homo Sapiens
FFYSEIMEL

SEQ ID NO: 162135 - protein, 9 aa, Homo Sapiens
FFYTHLINF

SEQ ID NO: 162136 - protein, 9 aa, Homo Sapiens
FFYVTETTF

SEQ ID NO: 162137 - protein, 9 aa, Homo Sapiens
FIAPTGHSL

SEQ ID NO: 162138 - protein, 9 aa, Homo Sapiens
FIISRTQAL

SEQ ID NO: 162139 - protein, 9 aa, Homo Sapiens
FIMDRAQAL

SEQ ID NO: 162140 - protein, 9 aa, Homo Sapiens
FIRVSGSEL

SEQ ID NO: 162141 - protein, 9 aa, Homo Sapiens
FIVEETLPL

SEQ ID NO: 162142 - protein, 9 aa, Homo Sapiens
FLPDHPIVL

SEQ ID NO: 162143 - protein, 9 aa, Homo Sapiens
FLPEMMVDH

SEQ ID NO: 162144 - protein, 9 aa, Homo Sapiens
FLPKGYLAL

SEQ ID NO: 162145 - protein, 9 aa, Homo Sapiens
FLPLFDRVL

SEQ ID NO: 162146 - protein, 9 aa, Homo Sapiens
FLPSHYNYL

SEQ ID NO: 162147 - protein, 9 aa, Homo Sapiens
FLYPFFGVL

SEQ ID NO: 162148 - protein, 9 aa, Homo Sapiens
FLYPFPLAL

SEQ ID NO: 162149 - protein, 9 aa, Homo Sapiens
FMHVQLEVM

SEQ ID NO: 162150 - protein, 9 aa, Homo Sapiens
FMLPKALAL

SEQ ID NO: 162151 - protein, 9 aa, Homo Sapiens
FTIFRTISV

SEQ ID NO: 162152 - protein, 9 aa, Homo Sapiens
FVRDMIREV

SEQ ID NO: 162153 - protein, 9 aa, Homo Sapiens
FVYITDNAY

SEQ ID NO: 162154 - protein, 9 aa, Homo Sapiens
FWPAVVKSV

SEQ ID NO: 162155 - protein, 9 aa, Homo Sapiens
FWPEAFSEV

SEQ ID NO: 162156 - protein, 9 aa, Homo Sapiens
FWPNPCSTF

SEQ ID NO: 162157 - protein, 9 aa, Homo Sapiens
FWPPQPKLY

SEQ ID NO: 162158 - protein, 9 aa, Homo Sapiens
FWPPYVELL

SEQ ID NO: 162159 - protein, 9 aa, Homo Sapiens
FYAEALRAV

SEQ ID NO: 162160 - protein, 9 aa, Homo Sapiens
FYAHSLVEL

SEQ ID NO: 162161 - protein, 9 aa, Homo Sapiens
FYAKGALQY

SEQ ID NO: 162162 - protein, 9 aa, Homo Sapiens
FYALVSQEL

SEQ ID NO: 162163 - protein, 9 aa, Homo Sapiens
FYCGGRLML

SEQ ID NO: 162164 - protein, 9 aa, Homo Sapiens
FYDDKKYTY

SEQ ID NO: 162165 - protein, 9 aa, Homo Sapiens
FYDNKGITY

SEQ ID NO: 162166 - protein, 9 aa, Homo Sapiens
FYEDNVLYM

SEQ ID NO: 162167 - protein, 9 aa, Homo Sapiens
FYEECKMEY

SEQ ID NO: 162168 - protein, 9 aa, Homo Sapiens
FYEERLTWH

SEQ ID NO: 162169 - protein, 9 aa, Homo Sapiens
FYEETKVKF

SEQ ID NO: 162170 - protein, 9 aa, Homo Sapiens
FYEGHITSL

SEQ ID NO: 162171 - protein, 9 aa, Homo Sapiens
FYEPYSREL

SEQ ID NO: 162172 - protein, 9 aa, Homo Sapiens
FYFALRDTL

SEQ ID NO: 162173 - protein, 9 aa, Homo Sapiens
FYFASKLVL

SEQ ID NO: 162174 - protein, 9 aa, Homo Sapiens
FYFDRNPYF

SEQ ID NO: 162175 - protein, 9 aa, Homo Sapiens
FYFPRCQGF

SEQ ID NO: 162176 - protein, 9 aa, Homo Sapiens
FYFTVRECY

SEQ ID NO: 162177 - protein, 9 aa, Homo Sapiens
FYGDLRKAL

SEQ ID NO: 162178 - protein, 9 aa, Homo Sapiens
FYHAYDSYL

SEQ ID NO: 162179 - protein, 9 aa, Homo Sapiens
FYHDAKEIF

SEQ ID NO: 162180 - protein, 9 aa, Homo Sapiens
FYHEAVVLF

SEQ ID NO: 162181 - protein, 9 aa, Homo Sapiens
FYHFVQIVH

SEQ ID NO: 162182 - protein, 9 aa, Homo Sapiens
FYHKGIASL

SEQ ID NO: 162183 - protein, 9 aa, Homo Sapiens
FYHPETQQY

SEQ ID NO: 162184 - protein, 9 aa, Homo Sapiens
FYHPETTQL

SEQ ID NO: 162185 - protein, 9 aa, Homo Sapiens
FYICHEVHL

SEQ ID NO: 162186 - protein, 9 aa, Homo Sapiens
FYIENQKEY

SEQ ID NO: 162187 - protein, 9 aa, Homo Sapiens
FYIESISYL

SEQ ID NO: 162188 - protein, 9 aa, Homo Sapiens
FYIFDRDVF

SEQ ID NO: 162189 - protein, 9 aa, Homo Sapiens
FYIIEREPL

SEQ ID NO: 162190 - protein, 9 aa, Homo Sapiens
FYIIGAITL

SEQ ID NO: 162191 - protein, 9 aa, Homo Sapiens
FYILTSKEL

SEQ ID NO: 162192 - protein, 9 aa, Homo Sapiens
FYIPKIQDL

SEQ ID NO: 162193 - protein, 9 aa, Homo Sapiens
FYIPQRPYM

SEQ ID NO: 162194 - protein, 9 aa, Homo Sapiens
FYISPRITF

SEQ ID NO: 162195 - protein, 9 aa, Homo Sapiens
FYISPVNKL

SEQ ID NO: 162196 - protein, 9 aa, Homo Sapiens
FYISWAEEY

SEQ ID NO: 162197 - protein, 9 aa, Homo Sapiens
FYITPSTSL

SEQ ID NO: 162198 - protein, 9 aa, Homo Sapiens
FYITSRTQF

SEQ ID NO: 162199 - protein, 9 aa, Homo Sapiens
FYIVDRDAF

SEQ ID NO: 162200 - protein, 9 aa, Homo Sapiens
FYIYGVSDL

SEQ ID NO: 162201 - protein, 9 aa, Homo Sapiens
FYLDNVIGH

SEQ ID NO: 162202 - protein, 9 aa, Homo Sapiens
FYLDTVSAL

SEQ ID NO: 162203 - protein, 9 aa, Homo Sapiens
FYLFHPLAY

SEQ ID NO: 162204 - protein, 9 aa, Homo Sapiens
FYLFHVQEV

SEQ ID NO: 162205 - protein, 9 aa, Homo Sapiens
FYLGKRCAY

SEQ ID NO: 162206 - protein, 9 aa, Homo Sapiens
FYLNQSTAY

SEQ ID NO: 162207 - protein, 9 aa, Homo Sapiens
FYLPHGLSI

SEQ ID NO: 162208 - protein, 9 aa, Homo Sapiens
FYLRDPIDL

SEQ ID NO: 162209 - protein, 9 aa, Homo Sapiens
FYLSKMISM

SEQ ID NO: 162210 - protein, 9 aa, Homo Sapiens
FYMDTSHLF

SEQ ID NO: 162211 - protein, 9 aa, Homo Sapiens
FYMEDYLTV

SEQ ID NO: 162212 - protein, 9 aa, Homo Sapiens
FYNCLQHAL

SEQ ID NO: 162213 - protein, 9 aa, Homo Sapiens
FYNEYVREL

SEQ ID NO: 162214 - protein, 9 aa, Homo Sapiens
FYNGPVSKF

SEQ ID NO: 162215 - protein, 9 aa, Homo Sapiens
FYNLIHPEY

SEQ ID NO: 162216 - protein, 9 aa, Homo Sapiens
FYNLSIQSF

SEQ ID NO: 162217 - protein, 9 aa, Homo Sapiens
FYNNRLQAY

SEQ ID NO: 162218 - protein, 9 aa, Homo Sapiens
FYNQVSTPL

SEQ ID NO: 162219 - protein, 9 aa, Homo Sapiens
FYNTSIEEM

SEQ ID NO: 162220 - protein, 9 aa, Homo Sapiens
FYPAKVTAV

SEQ ID NO: 162221 - protein, 9 aa, Homo Sapiens
FYPDAVEEW

SEQ ID NO: 162222 - protein, 9 aa, Homo Sapiens
FYPDKIDYA

SEQ ID NO: 162223 - protein, 9 aa, Homo Sapiens
FYPDLGPEL

SEQ ID NO: 162224 - protein, 9 aa, Homo Sapiens
FYPEEISSM

SEQ ID NO: 162225 - protein, 9 aa, Homo Sapiens
FYPEEVSSM

SEQ ID NO: 162226 - protein, 9 aa, Homo Sapiens
FYPELKLAY

SEQ ID NO: 162227 - protein, 9 aa, Homo Sapiens
FYPFAGHDL

SEQ ID NO: 162228 - protein, 9 aa, Homo Sapiens
FYPGLGLAL

SEQ ID NO: 162229 - protein, 9 aa, Homo Sapiens
FYPGQAPSL

SEQ ID NO: 162230 - protein, 9 aa, Homo Sapiens
FYPHHPQML

SEQ ID NO: 162231 - protein, 9 aa, Homo Sapiens
FYPIYFRPL

SEQ ID NO: 162232 - protein, 9 aa, Homo Sapiens
FYPPDPAQL

SEQ ID NO: 162233 - protein, 9 aa, Homo Sapiens
FYPPKVELF

SEQ ID NO: 162234 - protein, 9 aa, Homo Sapiens
FYPPLTSSL

SEQ ID NO: 162235 - protein, 9 aa, Homo Sapiens
FYPPPRITL

SEQ ID NO: 162236 - protein, 9 aa, Homo Sapiens
FYPSGGLEV

SEQ ID NO: 162237 - protein, 9 aa, Homo Sapiens
FYPTFKEGM

SEQ ID NO: 162238 - protein, 9 aa, Homo Sapiens
FYPYGLQTF

SEQ ID NO: 162239 - protein, 9 aa, Homo Sapiens
FYQDKLKSL

SEQ ID NO: 162240 - protein, 9 aa, Homo Sapiens
FYQGHVEGY

SEQ ID NO: 162241 - protein, 9 aa, Homo Sapiens
FYQGIVQQF

SEQ ID NO: 162242 - protein, 9 aa, Homo Sapiens
FYQHNVEKL

SEQ ID NO: 162243 - protein, 9 aa, Homo Sapiens
FYQPKIQQF

SEQ ID NO: 162244 - protein, 9 aa, Homo Sapiens
FYQPMPLKA

SEQ ID NO: 162245 - protein, 9 aa, Homo Sapiens
FYQPTCIVL

SEQ ID NO: 162246 - protein, 9 aa, Homo Sapiens
FYQRFPLSF

SEQ ID NO: 162247 - protein, 9 aa, Homo Sapiens
FYRPLAPEL

SEQ ID NO: 162248 - protein, 9 aa, Homo Sapiens
FYSEVHPHY

SEQ ID NO: 162249 - protein, 9 aa, Homo Sapiens
FYSGSPTSY

SEQ ID NO: 162250 - protein, 9 aa, Homo Sapiens
FYSNKEIFL

SEQ ID NO: 162251 - protein, 9 aa, Homo Sapiens
FYSPNIMAL

SEQ ID NO: 162252 - protein, 9 aa, Homo Sapiens
FYTVAVTSL

SEQ ID NO: 162253 - protein, 9 aa, Homo Sapiens
FYVASSRQL

SEQ ID NO: 162254 - protein, 9 aa, Homo Sapiens
FYVDTVRAF

SEQ ID NO: 162255 - protein, 9 aa, Homo Sapiens
FYVETVVTY

SEQ ID NO: 162256 - protein, 9 aa, Homo Sapiens
FYVGEIIGK

SEQ ID NO: 162257 - protein, 9 aa, Homo Sapiens
FYVLSTLAF

SEQ ID NO: 162258 - protein, 9 aa, Homo Sapiens
FYVPFAKAL

SEQ ID NO: 162259 - protein, 9 aa, Homo Sapiens
FYVRLIDSM

SEQ ID NO: 162260 - protein, 9 aa, Homo Sapiens
FYVVVTEGY

SEQ ID NO: 162261 - protein, 9 aa, Homo Sapiens
FYWARKTSH

SEQ ID NO: 162262 - protein, 9 aa, Homo Sapiens
FYYGGQVNY

SEQ ID NO: 162263 - protein, 9 aa, Homo Sapiens
FYYIRISEL

SEQ ID NO: 162264 - protein, 9 aa, Homo Sapiens
GFIDSFRPL

SEQ ID NO: 162265 - protein, 9 aa, Homo Sapiens
GFLGGAKAM

SEQ ID NO: 162266 - protein, 9 aa, Homo Sapiens
GFMPGAHVF

SEQ ID NO: 162267 - protein, 9 aa, Homo Sapiens
GFPEAASSF

SEQ ID NO: 162268 - protein, 9 aa, Homo Sapiens
GFPEQATAF

SEQ ID NO: 162269 - protein, 9 aa, Homo Sapiens
GFPFYDKPM

SEQ ID NO: 162270 - protein, 9 aa, Homo Sapiens
GFPFYGKPM

SEQ ID NO: 162271 - protein, 9 aa, Homo Sapiens
GFPSSVAAL

SEQ ID NO: 162272 - protein, 9 aa, Homo Sapiens
GFPWKTSDF

SEQ ID NO: 162273 - protein, 9 aa, Homo Sapiens
GFQTGTSSL

SEQ ID NO: 162274 - protein, 9 aa, Homo Sapiens
GFVNHALEL

SEQ ID NO: 162275 - protein, 9 aa, Homo Sapiens
GKEIIEYYL

SEQ ID NO: 162276 - protein, 9 aa, Homo Sapiens
GYAPYVNRI

SEQ ID NO: 162277 - protein, 9 aa, Homo Sapiens
GYFAGKLSY

SEQ ID NO: 162278 - protein, 9 aa, Homo Sapiens
GYHDIVECL

SEQ ID NO: 162279 - protein, 9 aa, Homo Sapiens
GYIGAALVL

SEQ ID NO: 162280 - protein, 9 aa, Homo Sapiens
GYLAANSRF

SEQ ID NO: 162281 - protein, 9 aa, Homo Sapiens
GYLAASQSF

SEQ ID NO: 162282 - protein, 9 aa, Homo Sapiens
GYLISGSSY

SEQ ID NO: 162283 - protein, 9 aa, Homo Sapiens
GYLPGTAEM

SEQ ID NO: 162284 - protein, 9 aa, Homo Sapiens
GYLPLAHVL

SEQ ID NO: 162285 - protein, 9 aa, Homo Sapiens
GYMDLASRL

SEQ ID NO: 162286 - protein, 9 aa, Homo Sapiens
GYMEKIKPM

SEQ ID NO: 162287 - protein, 9 aa, Homo Sapiens
GYPEVALHF

SEQ ID NO: 162288 - protein, 9 aa, Homo Sapiens
GYQLTGHAY

SEQ ID NO: 162289 - protein, 9 aa, Homo Sapiens
GYSFSLTTF

SEQ ID NO: 162290 - protein, 9 aa, Homo Sapiens
GYVLYASAM

SEQ ID NO: 162291 - protein, 9 aa, Homo Sapiens
GYVVVTSSM

SEQ ID NO: 162292 - protein, 9 aa, Homo Sapiens
GYYSHALYL

SEQ ID NO: 162293 - protein, 9 aa, Homo Sapiens
HAPFTATSL

SEQ ID NO: 162294 - protein, 9 aa, Homo Sapiens
HAPLTNIPL

SEQ ID NO: 162295 - protein, 9 aa, Homo Sapiens
HFFDGKTAL

SEQ ID NO: 162296 - protein, 9 aa, Homo Sapiens
HFHITNTTF

SEQ ID NO: 162297 - protein, 9 aa, Homo Sapiens
HFHTQTQSL

SEQ ID NO: 162298 - protein, 9 aa, Homo Sapiens
HFIAVAVCL

SEQ ID NO: 162299 - protein, 9 aa, Homo Sapiens
HFIEKAHTL

SEQ ID NO: 162300 - protein, 9 aa, Homo Sapiens
HFIFFVQEF

SEQ ID NO: 162301 - protein, 9 aa, Homo Sapiens
HFIRPGNAL

SEQ ID NO: 162302 - protein, 9 aa, Homo Sapiens
HFITPVSTL

SEQ ID NO: 162303 - protein, 9 aa, Homo Sapiens
HFLDRHLVF

SEQ ID NO: 162304 - protein, 9 aa, Homo Sapiens
HFLQQPRPL

SEQ ID NO: 162305 - protein, 9 aa, Homo Sapiens
HFNPTGSAF

SEQ ID NO: 162306 - protein, 9 aa, Homo Sapiens
HFNTVLEAY

SEQ ID NO: 162307 - protein, 9 aa, Homo Sapiens
HFNVTNTTF

SEQ ID NO: 162308 - protein, 9 aa, Homo Sapiens
HFPDLFHVM

SEQ ID NO: 162309 - protein, 9 aa, Homo Sapiens
HFPEFSQIL

SEQ ID NO: 162310 - protein, 9 aa, Homo Sapiens
HFPGLASEL

SEQ ID NO: 162311 - protein, 9 aa, Homo Sapiens
HFPLFESHM

SEQ ID NO: 162312 - protein, 9 aa, Homo Sapiens
HFPMQSREF

SEQ ID NO: 162313 - protein, 9 aa, Homo Sapiens
HFPPLYKEL

SEQ ID NO: 162314 - protein, 9 aa, Homo Sapiens
HFQEKVESL

SEQ ID NO: 162315 - protein, 9 aa, Homo Sapiens
HFQPSAASL

SEQ ID NO: 162316 - protein, 9 aa, Homo Sapiens
HFQPSTVEM

SEQ ID NO: 162317 - protein, 9 aa, Homo Sapiens
HFQPSVLDF

SEQ ID NO: 162318 - protein, 9 aa, Homo Sapiens
HFQTMYEHL

SEQ ID NO: 162319 - protein, 9 aa, Homo Sapiens
HFVEKAAAV

SEQ ID NO: 162320 - protein, 9 aa, Homo Sapiens
HFVPGTTAV

SEQ ID NO: 162321 - protein, 9 aa, Homo Sapiens
HFYGKAIEL

SEQ ID NO: 162322 - protein, 9 aa, Homo Sapiens
HFYLKALSL

SEQ ID NO: 162323 - protein, 9 aa, Homo Sapiens
HFYNVKSSL

SEQ ID NO: 162324 - protein, 9 aa, Homo Sapiens
HFYRSLVAH

SEQ ID NO: 162325 - protein, 9 aa, Homo Sapiens
HFYRSLVSH

SEQ ID NO: 162326 - protein, 9 aa, Homo Sapiens
HFYSSIPSM

SEQ ID NO: 162327 - protein, 9 aa, Homo Sapiens
HFYYFVKEF

SEQ ID NO: 162328 - protein, 9 aa, Homo Sapiens
HGLIRKYGL

SEQ ID NO: 162329 - protein, 9 aa, Homo Sapiens
HHPDYNNEL

SEQ ID NO: 162330 - protein, 9 aa, Homo Sapiens
HLPSGVKSL

SEQ ID NO: 162331 - protein, 9 aa, Homo Sapiens
HYFCALNTL

SEQ ID NO: 162332 - protein, 9 aa, Homo Sapiens
HYFERHLEF

SEQ ID NO: 162333 - protein, 9 aa, Homo Sapiens
HYFFAVSTL

SEQ ID NO: 162334 - protein, 9 aa, Homo Sapiens
HYFSKMKAL

SEQ ID NO: 162335 - protein, 9 aa, Homo Sapiens
HYFSPFRPY

SEQ ID NO: 162336 - protein, 9 aa, Homo Sapiens
HYFSQGLSV

SEQ ID NO: 162337 - protein, 9 aa, Homo Sapiens
HYHPIVQRF

SEQ ID NO: 162338 - protein, 9 aa, Homo Sapiens
HYHPSKVAA

SEQ ID NO: 162339 - protein, 9 aa, Homo Sapiens
HYIDRVRAL

SEQ ID NO: 162340 - protein, 9 aa, Homo Sapiens
HYIIAARAL

SEQ ID NO: 162341 - protein, 9 aa, Homo Sapiens
HYINEVLFL

SEQ ID NO: 162342 - protein, 9 aa, Homo Sapiens
HYIQMVKEL

SEQ ID NO: 162343 - protein, 9 aa, Homo Sapiens
HYITIVKSH

SEQ ID NO: 162344 - protein, 9 aa, Homo Sapiens
HYITPMMEL

SEQ ID NO: 162345 - protein, 9 aa, Homo Sapiens
HYLVSVMAV

SEQ ID NO: 162346 - protein, 9 aa, Homo Sapiens
HYLYIQMEY

SEQ ID NO: 162347 - protein, 9 aa, Homo Sapiens
HYMFEAICL

SEQ ID NO: 162348 - protein, 9 aa, Homo Sapiens
HYMSINDSF

SEQ ID NO: 162349 - protein, 9 aa, Homo Sapiens
HYNNIMALY

SEQ ID NO: 162350 - protein, 9 aa, Homo Sapiens
HYNTITDCY

SEQ ID NO: 162351 - protein, 9 aa, Homo Sapiens
HYPDFHQEL

SEQ ID NO: 162352 - protein, 9 aa, Homo Sapiens
HYPDYSWSA

SEQ ID NO: 162353 - protein, 9 aa, Homo Sapiens
HYPNWFKAL

SEQ ID NO: 162354 - protein, 9 aa, Homo Sapiens
HYQAIVTAY

SEQ ID NO: 162355 - protein, 9 aa, Homo Sapiens
HYQLQTTSL

SEQ ID NO: 162356 - protein, 9 aa, Homo Sapiens
HYQPVDVSL

SEQ ID NO: 162357 - protein, 9 aa, Homo Sapiens
HYQQAELAL

SEQ ID NO: 162358 - protein, 9 aa, Homo Sapiens
HYRYYVREM

SEQ ID NO: 162359 - protein, 9 aa, Homo Sapiens
HYSFYIETF

SEQ ID NO: 162360 - protein, 9 aa, Homo Sapiens
HYTVNLNTY

SEQ ID NO: 162361 - protein, 9 aa, Homo Sapiens
HYVFEAKEF

SEQ ID NO: 162362 - protein, 9 aa, Homo Sapiens
HYYGPALEF

SEQ ID NO: 162363 - protein, 9 aa, Homo Sapiens
HYYQKALEL

SEQ ID NO: 162364 - protein, 9 aa, Homo Sapiens
HYYSITINY

SEQ ID NO: 162365 - protein, 9 aa, Homo Sapiens
IAYDVTYSL

SEQ ID NO: 162366 - protein, 9 aa, Homo Sapiens
IFATGCSSI

SEQ ID NO: 162367 - protein, 9 aa, Homo Sapiens
IFDEFRTVL

SEQ ID NO: 162368 - protein, 9 aa, Homo Sapiens
IFEAKKSFY

SEQ ID NO: 162369 - protein, 9 aa, Homo Sapiens
IFEGGATEL

SEQ ID NO: 162370 - protein, 9 aa, Homo Sapiens
IFFPGVSEF

SEQ ID NO: 162371 - protein, 9 aa, Homo Sapiens
IFHITLVSL

SEQ ID NO: 162372 - protein, 9 aa, Homo Sapiens
IFHIVENDL

SEQ ID NO: 162373 - protein, 9 aa, Homo Sapiens
IFHNNWREM

SEQ ID NO: 162374 - protein, 9 aa, Homo Sapiens
IFIAAASEI

SEQ ID NO: 162375 - protein, 9 aa, Homo Sapiens
IFIAGSKQY

SEQ ID NO: 162376 - protein, 9 aa, Homo Sapiens
IFIDEIDSF

SEQ ID NO: 162377 - protein, 9 aa, Homo Sapiens
IFIDEIDSI

SEQ ID NO: 162378 - protein, 9 aa, Homo Sapiens
IFIDEVDSL

SEQ ID NO: 162379 - protein, 9 aa, Homo Sapiens
IFIKDSNSL

SEQ ID NO: 162380 - protein, 9 aa, Homo Sapiens
IFINLPRSM

SEQ ID NO: 162381 - protein, 9 aa, Homo Sapiens
IFIPKTEEM

SEQ ID NO: 162382 - protein, 9 aa, Homo Sapiens
IFIPSSIAF

SEQ ID NO: 162383 - protein, 9 aa, Homo Sapiens
IFLCMETHY

SEQ ID NO: 162384 - protein, 9 aa, Homo Sapiens
IFLETNMSM

SEQ ID NO: 162385 - protein, 9 aa, Homo Sapiens
IFLNLKTAL

SEQ ID NO: 162386 - protein, 9 aa, Homo Sapiens
IFMDEIDSI

SEQ ID NO: 162387 - protein, 9 aa, Homo Sapiens
IFMENRNEF

SEQ ID NO: 162388 - protein, 9 aa, Homo Sapiens
IFMERIKNM

SEQ ID NO: 162389 - protein, 9 aa, Homo Sapiens
IFNAVKASL

SEQ ID NO: 162390 - protein, 9 aa, Homo Sapiens
IFNTVNTSL

SEQ ID NO: 162391 - protein, 9 aa, Homo Sapiens
IFNVAGYSH

SEQ ID NO: 162392 - protein, 9 aa, Homo Sapiens
IFPAKTITY

SEQ ID NO: 162393 - protein, 9 aa, Homo Sapiens
IFPDRATLY

SEQ ID NO: 162394 - protein, 9 aa, Homo Sapiens
IFPEALRCL

SEQ ID NO: 162395 - protein, 9 aa, Homo Sapiens
IFPECPHVY

SEQ ID NO: 162396 - protein, 9 aa, Homo Sapiens
IFPEFLKEL

SEQ ID NO: 162397 - protein, 9 aa, Homo Sapiens
IFPEGFVEL

SEQ ID NO: 162398 - protein, 9 aa, Homo Sapiens
IFPEGRPVV

SEQ ID NO: 162399 - protein, 9 aa, Homo Sapiens
IFPLETPAF

SEQ ID NO: 162400 - protein, 9 aa, Homo Sapiens
IFPLIYSEM

SEQ ID NO: 162401 - protein, 9 aa, Homo Sapiens
IFPNQTEEL

SEQ ID NO: 162402 - protein, 9 aa, Homo Sapiens
IFPPSVGEF

SEQ ID NO: 162403 - protein, 9 aa, Homo Sapiens
IFPSSISAM

SEQ ID NO: 162404 - protein, 9 aa, Homo Sapiens
IFPTLTSPL

SEQ ID NO: 162405 - protein, 9 aa, Homo Sapiens
IFPTSTISF

SEQ ID NO: 162406 - protein, 9 aa, Homo Sapiens
IFPYAFKEV

SEQ ID NO: 162407 - protein, 9 aa, Homo Sapiens
IFQALNVYY

SEQ ID NO: 162408 - protein, 9 aa, Homo Sapiens
IFQAVETAI

SEQ ID NO: 162409 - protein, 9 aa, Homo Sapiens
IFQDPRSWF

SEQ ID NO: 162410 - protein, 9 aa, Homo Sapiens
IFQDPTAMM

SEQ ID NO: 162411 - protein, 9 aa, Homo Sapiens
IFQEPVSKY

SEQ ID NO: 162412 - protein, 9 aa, Homo Sapiens
IFQEQVEKL

SEQ ID NO: 162413 - protein, 9 aa, Homo Sapiens
IFQGNVHNF

SEQ ID NO: 162414 - protein, 9 aa, Homo Sapiens
IFQIGVLGF

SEQ ID NO: 162415 - protein, 9 aa, Homo Sapiens
IFQIHTSRM

SEQ ID NO: 162416 - protein, 9 aa, Homo Sapiens
IFQNIKQEY

SEQ ID NO: 162417 - protein, 9 aa, Homo Sapiens
IFQPHVRHL

SEQ ID NO: 162418 - protein, 9 aa, Homo Sapiens
IFQPPARCL

SEQ ID NO: 162419 - protein, 9 aa, Homo Sapiens
IFQTAKETL

SEQ ID NO: 162420 - protein, 9 aa, Homo Sapiens
IFQTGLVAY

SEQ ID NO: 162421 - protein, 9 aa, Homo Sapiens
IFSIREVSF

SEQ ID NO: 162422 - protein, 9 aa, Homo Sapiens
IFVPARNNM

SEQ ID NO: 162423 - protein, 9 aa, Homo Sapiens
IFVVASSSY

SEQ ID NO: 162424 - protein, 9 aa, Homo Sapiens
IFYDRAEYL

SEQ ID NO: 162425 - protein, 9 aa, Homo Sapiens
ILPEMVGSM

SEQ ID NO: 162426 - protein, 9 aa, Homo Sapiens
ILPKYVQQV

SEQ ID NO: 162427 - protein, 9 aa, Homo Sapiens
IPEEDAGKL

SEQ ID NO: 162428 - protein, 9 aa, Homo Sapiens
IWPEIQQEL

SEQ ID NO: 162429 - protein, 9 aa, Homo Sapiens
IWPEKVLDI

SEQ ID NO: 162430 - protein, 9 aa, Homo Sapiens
IWPLYLRFL

SEQ ID NO: 162431 - protein, 9 aa, Homo Sapiens
IWVDYINFL

SEQ ID NO: 162432 - protein, 9 aa, Homo Sapiens
IYADYARSL

SEQ ID NO: 162433 - protein, 9 aa, Homo Sapiens
IYAPKLQEF

SEQ ID NO: 162434 - protein, 9 aa, Homo Sapiens
IYATEAHVF

SEQ ID NO: 162435 - protein, 9 aa, Homo Sapiens
IYAVNGIAF

SEQ ID NO: 162436 - protein, 9 aa, Homo Sapiens
IYELMQTEF

SEQ ID NO: 162437 - protein, 9 aa, Homo Sapiens
IYFADGKVY

SEQ ID NO: 162438 - protein, 9 aa, Homo Sapiens
IYFDSSATY

SEQ ID NO: 162439 - protein, 9 aa, Homo Sapiens
IYFEYSHAF

SEQ ID NO: 162440 - protein, 9 aa, Homo Sapiens
IYFTRIIAF

SEQ ID NO: 162441 - protein, 9 aa, Homo Sapiens
IYGPHAVSL

SEQ ID NO: 162442 - protein, 9 aa, Homo Sapiens
IYHIQYDEY

SEQ ID NO: 162443 - protein, 9 aa, Homo Sapiens
IYHNGVLEF

SEQ ID NO: 162444 - protein, 9 aa, Homo Sapiens
IYHQTASIL

SEQ ID NO: 162445 - protein, 9 aa, Homo Sapiens
IYIDRGVVF

SEQ ID NO: 162446 - protein, 9 aa, Homo Sapiens
IYIINVHSM

SEQ ID NO: 162447 - protein, 9 aa, Homo Sapiens
IYILTNVAY

SEQ ID NO: 162448 - protein, 9 aa, Homo Sapiens
IYLAIQSSL

SEQ ID NO: 162449 - protein, 9 aa, Homo Sapiens
IYLDMLNVY

SEQ ID NO: 162450 - protein, 9 aa, Homo Sapiens
IYLDSVMCL

SEQ ID NO: 162451 - protein, 9 aa, Homo Sapiens
IYLEGKIDY

SEQ ID NO: 162452 - protein, 9 aa, Homo Sapiens
IYLIGHVAA

SEQ ID NO: 162453 - protein, 9 aa, Homo Sapiens
IYLIKGSAL

SEQ ID NO: 162454 - protein, 9 aa, Homo Sapiens
IYLLIHNNF

SEQ ID NO: 162455 - protein, 9 aa, Homo Sapiens
IYLPAAQTM

SEQ ID NO: 162456 - protein, 9 aa, Homo Sapiens
IYLTFPVAM

SEQ ID NO: 162457 - protein, 9 aa, Homo Sapiens
IYMDTLNIF

SEQ ID NO: 162458 - protein, 9 aa, Homo Sapiens
IYMFNMTGL

SEQ ID NO: 162459 - protein, 9 aa, Homo Sapiens
IYMGHVKGY

SEQ ID NO: 162460 - protein, 9 aa, Homo Sapiens
IYMQKVIYY

SEQ ID NO: 162461 - protein, 9 aa, Homo Sapiens
IYNEVNQTY

SEQ ID NO: 162462 - protein, 9 aa, Homo Sapiens
IYPDSFTVL

SEQ ID NO: 162463 - protein, 9 aa, Homo Sapiens
IYPEAVTMF

SEQ ID NO: 162464 - protein, 9 aa, Homo Sapiens
IYPETAAIL

SEQ ID NO: 162465 - protein, 9 aa, Homo Sapiens
IYPEVVHMF

SEQ ID NO: 162466 - protein, 9 aa, Homo Sapiens
IYPGHGMMF

SEQ ID NO: 162467 - protein, 9 aa, Homo Sapiens
IYPLGSKSL

SEQ ID NO: 162468 - protein, 9 aa, Homo Sapiens
IYPPEVAEF

SEQ ID NO: 162469 - protein, 9 aa, Homo Sapiens
IYPVGWCEL

SEQ ID NO: 162470 - protein, 9 aa, Homo Sapiens
IYPVLPKLL

SEQ ID NO: 162471 - protein, 9 aa, Homo Sapiens
IYPVNAISF

SEQ ID NO: 162472 - protein, 9 aa, Homo Sapiens
IYPYAAISY

SEQ ID NO: 162473 - protein, 9 aa, Homo Sapiens
IYPYVIQEL

SEQ ID NO: 162474 - protein, 9 aa, Homo Sapiens
IYQEKVLDL

SEQ ID NO: 162475 - protein, 9 aa, Homo Sapiens
IYQELVTKY

SEQ ID NO: 162476 - protein, 9 aa, Homo Sapiens
IYQIHKEYL

SEQ ID NO: 162477 - protein, 9 aa, Homo Sapiens
IYQNAATSF

SEQ ID NO: 162478 - protein, 9 aa, Homo Sapiens
IYQQIIQTY

SEQ ID NO: 162479 - protein, 9 aa, Homo Sapiens
IYQQQVSSL

SEQ ID NO: 162480 - protein, 9 aa, Homo Sapiens
IYQSKVREL

SEQ ID NO: 162481 - protein, 9 aa, Homo Sapiens
IYQSMPRML

SEQ ID NO: 162482 - protein, 9 aa, Homo Sapiens
IYQYMEEIY

SEQ ID NO: 162483 - protein, 9 aa, Homo Sapiens
IYQYVLNSM

SEQ ID NO: 162484 - protein, 9 aa, Homo Sapiens
IYSFHTLSF

SEQ ID NO: 162485 - protein, 9 aa, Homo Sapiens
IYSPEGHVL

SEQ ID NO: 162486 - protein, 9 aa, Homo Sapiens
IYSSKTLEL

SEQ ID NO: 162487 - protein, 9 aa, Homo Sapiens
IYTSSVNRL

SEQ ID NO: 162488 - protein, 9 aa, Homo Sapiens
IYVAYCTVY

SEQ ID NO: 162489 - protein, 9 aa, Homo Sapiens
IYVISAETF

SEQ ID NO: 162490 - protein, 9 aa, Homo Sapiens
IYVNMKTDF

SEQ ID NO: 162491 - protein, 9 aa, Homo Sapiens
IYVSERTEL

SEQ ID NO: 162492 - protein, 9 aa, Homo Sapiens
IYVTGGYSY

SEQ ID NO: 162493 - protein, 9 aa, Homo Sapiens
IYVTGITNH

SEQ ID NO: 162494 - protein, 9 aa, Homo Sapiens
IYWDGPLAL

SEQ ID NO: 162495 - protein, 9 aa, Homo Sapiens
IYYFAAVAH

SEQ ID NO: 162496 - protein, 9 aa, Homo Sapiens
IYYFKANVF

SEQ ID NO: 162497 - protein, 9 aa, Homo Sapiens
IYYQSPLSL

SEQ ID NO: 162498 - protein, 9 aa, Homo Sapiens
IYYWHVIAA

SEQ ID NO: 162499 - protein, 9 aa, Homo Sapiens
KAPEPLSSL

SEQ ID NO: 162500 - protein, 9 aa, Homo Sapiens
KFFDSACTM

SEQ ID NO: 162501 - protein, 9 aa, Homo Sapiens
KFIDKQLEL

SEQ ID NO: 162502 - protein, 9 aa, Homo Sapiens
KFIDTTSKF

SEQ ID NO: 162503 - protein, 9 aa, Homo Sapiens
KFIEKAQNM

SEQ ID NO: 162504 - protein, 9 aa, Homo Sapiens
KFISGILAA

SEQ ID NO: 162505 - protein, 9 aa, Homo Sapiens
KFISSVTSH

SEQ ID NO: 162506 - protein, 9 aa, Homo Sapiens
KFKEVGEAF

SEQ ID NO: 162507 - protein, 9 aa, Homo Sapiens
KFLAAGTHL

SEQ ID NO: 162508 - protein, 9 aa, Homo Sapiens
KFLANVSTV

SEQ ID NO: 162509 - protein, 9 aa, Homo Sapiens
KFLASDVVF

SEQ ID NO: 162510 - protein, 9 aa, Homo Sapiens
KFLERFTSM

SEQ ID NO: 162511 - protein, 9 aa, Homo Sapiens
KFLNAESYY

SEQ ID NO: 162512 - protein, 9 aa, Homo Sapiens
KFLPDAQAL

SEQ ID NO: 162513 - protein, 9 aa, Homo Sapiens
KFLVAVESM

SEQ ID NO: 162514 - protein, 9 aa, Homo Sapiens
KFMDKKLSL

SEQ ID NO: 162515 - protein, 9 aa, Homo Sapiens
KFMQDVNTL

SEQ ID NO: 162516 - protein, 9 aa, Homo Sapiens
KFNPCGKVF

SEQ ID NO: 162517 - protein, 9 aa, Homo Sapiens
KFNVLLTTY

SEQ ID NO: 162518 - protein, 9 aa, Homo Sapiens
KFNVTTVDM

SEQ ID NO: 162519 - protein, 9 aa, Homo Sapiens
KFPAYERVL

SEQ ID NO: 162520 - protein, 9 aa, Homo Sapiens
KFPDGFEKF

SEQ ID NO: 162521 - protein, 9 aa, Homo Sapiens
KFPDSVEEL

SEQ ID NO: 162522 - protein, 9 aa, Homo Sapiens
KFPDYKSTW

SEQ ID NO: 162523 - protein, 9 aa, Homo Sapiens
KFPEIVAPL

SEQ ID NO: 162524 - protein, 9 aa, Homo Sapiens
KFPEVIINF

SEQ ID NO: 162525 - protein, 9 aa, Homo Sapiens
KFPIVNAEL

SEQ ID NO: 162526 - protein, 9 aa, Homo Sapiens
KFPTYPVPH

SEQ ID NO: 162527 - protein, 9 aa, Homo Sapiens
KFQAMDISL

SEQ ID NO: 162528 - protein, 9 aa, Homo Sapiens
KFSPNTSQF

SEQ ID NO: 162529 - protein, 9 aa, Homo Sapiens
KFVEKMTSF

SEQ ID NO: 162530 - protein, 9 aa, Homo Sapiens
KFYATLVRY

SEQ ID NO: 162531 - protein, 9 aa, Homo Sapiens
KFYNAGLAY

SEQ ID NO: 162532 - protein, 9 aa, Homo Sapiens
KFYSVNVDY

SEQ ID NO: 162533 - protein, 9 aa, Homo Sapiens
KFYYSKIEY

SEQ ID NO: 162534 - protein, 9 aa, Homo Sapiens
KIVKWDRDM

SEQ ID NO: 162535 - protein, 9 aa, Homo Sapiens
KLPANHPLL

SEQ ID NO: 162536 - protein, 9 aa, Homo Sapiens
KLPDYNNRL

SEQ ID NO: 162537 - protein, 9 aa, Homo Sapiens
KLPGNISSL

SEQ ID NO: 162538 - protein, 9 aa, Homo Sapiens
KWPETPLLL

SEQ ID NO: 162539 - protein, 9 aa, Homo Sapiens
KYAMMFAEL

SEQ ID NO: 162540 - protein, 9 aa, Homo Sapiens
KYAVQLVEM

SEQ ID NO: 162541 - protein, 9 aa, Homo Sapiens
KYFGRSLEL

SEQ ID NO: 162542 - protein, 9 aa, Homo Sapiens
KYFPSRVSI

SEQ ID NO: 162543 - protein, 9 aa, Homo Sapiens
KYFSSLTTH

SEQ ID NO: 162544 - protein, 9 aa, Homo Sapiens
KYFSSMAEF

SEQ ID NO: 162545 - protein, 9 aa, Homo Sapiens
KYFTQGNCV

SEQ ID NO: 162546 - protein, 9 aa, Homo Sapiens
KYHVSEKPY

SEQ ID NO: 162547 - protein, 9 aa, Homo Sapiens
KYIDFTSDY

SEQ ID NO: 162548 - protein, 9 aa, Homo Sapiens
KYIEGVSDF

SEQ ID NO: 162549 - protein, 9 aa, Homo Sapiens
KYIGYARQY

SEQ ID NO: 162550 - protein, 9 aa, Homo Sapiens
KYIHSANVL

SEQ ID NO: 162551 - protein, 9 aa, Homo Sapiens
KYIQEAEML

SEQ ID NO: 162552 - protein, 9 aa, Homo Sapiens
KYISGPHEL

SEQ ID NO: 162553 - protein, 9 aa, Homo Sapiens
KYKASITAL

SEQ ID NO: 162554 - protein, 9 aa, Homo Sapiens
KYLALRIAL

SEQ ID NO: 162555 - protein, 9 aa, Homo Sapiens
KYLAVRLAL

SEQ ID NO: 162556 - protein, 9 aa, Homo Sapiens
KYLNMRSTY

SEQ ID NO: 162557 - protein, 9 aa, Homo Sapiens
KYLTSNVAY

SEQ ID NO: 162558 - protein, 9 aa, Homo Sapiens
KYMAEVKKY

SEQ ID NO: 162559 - protein, 9 aa, Homo Sapiens
KYMDVQFDF

SEQ ID NO: 162560 - protein, 9 aa, Homo Sapiens
KYMLTHQEL

SEQ ID NO: 162561 - protein, 9 aa, Homo Sapiens
KYMNNITYY

SEQ ID NO: 162562 - protein, 9 aa, Homo Sapiens
KYMPNVKVA

SEQ ID NO: 162563 - protein, 9 aa, Homo Sapiens
KYMQKSLEL

SEQ ID NO: 162564 - protein, 9 aa, Homo Sapiens
KYMSVIAEL

SEQ ID NO: 162565 - protein, 9 aa, Homo Sapiens
KYMYFTVVM

SEQ ID NO: 162566 - protein, 9 aa, Homo Sapiens
KYNACILEY

SEQ ID NO: 162567 - protein, 9 aa, Homo Sapiens
KYNIMLVRL

SEQ ID NO: 162568 - protein, 9 aa, Homo Sapiens
KYPASSSVF

SEQ ID NO: 162569 - protein, 9 aa, Homo Sapiens
KYPDYEVTW

SEQ ID NO: 162570 - protein, 9 aa, Homo Sapiens
KYPEAAACY

SEQ ID NO: 162571 - protein, 9 aa, Homo Sapiens
KYPHYFPLL

SEQ ID NO: 162572 - protein, 9 aa, Homo Sapiens
KYPHYFPVM

SEQ ID NO: 162573 - protein, 9 aa, Homo Sapiens
KYPNFDVEY

SEQ ID NO: 162574 - protein, 9 aa, Homo Sapiens
KYQAQDNFM

SEQ ID NO: 162575 - protein, 9 aa, Homo Sapiens
KYQAVTATL

SEQ ID NO: 162576 - protein, 9 aa, Homo Sapiens
KYQEVTNNL

SEQ ID NO: 162577 - protein, 9 aa, Homo Sapiens
KYQEYTNEL

SEQ ID NO: 162578 - protein, 9 aa, Homo Sapiens
KYQHTGAVL

SEQ ID NO: 162579 - protein, 9 aa, Homo Sapiens
KYQIINEEF

SEQ ID NO: 162580 - protein, 9 aa, Homo Sapiens
KYQIQQVDM

SEQ ID NO: 162581 - protein, 9 aa, Homo Sapiens
KYQPRIAVF

SEQ ID NO: 162582 - protein, 9 aa, Homo Sapiens
KYQSPVRVY

SEQ ID NO: 162583 - protein, 9 aa, Homo Sapiens
KYTEGVQSL

SEQ ID NO: 162584 - protein, 9 aa, Homo Sapiens
KYYAKKILY

SEQ ID NO: 162585 - protein, 9 aa, Homo Sapiens
KYYDAIACL

SEQ ID NO: 162586 - protein, 9 aa, Homo Sapiens
KYYFAVDTM

SEQ ID NO: 162587 - protein, 9 aa, Homo Sapiens
KYYFILSPY

SEQ ID NO: 162588 - protein, 9 aa, Homo Sapiens
KYYFYDNYF

SEQ ID NO: 162589 - protein, 9 aa, Homo Sapiens
KYYIPEVVY

SEQ ID NO: 162590 - protein, 9 aa, Homo Sapiens
KYYSADINL

SEQ ID NO: 162591 - protein, 9 aa, Homo Sapiens
LFALHASQF

SEQ ID NO: 162592 - protein, 9 aa, Homo Sapiens
LFAPFIVYY

SEQ ID NO: 162593 - protein, 9 aa, Homo Sapiens
LFAPYGTVM

SEQ ID NO: 162594 - protein, 9 aa, Homo Sapiens
LFEGRRIEF

SEQ ID NO: 162595 - protein, 9 aa, Homo Sapiens
LFFDSKQSL

SEQ ID NO: 162596 - protein, 9 aa, Homo Sapiens
LFGPGAGGL

SEQ ID NO: 162597 - protein, 9 aa, Homo Sapiens
LFHEMETCL

SEQ ID NO: 162598 - protein, 9 aa, Homo Sapiens
LFHEVVQAF

SEQ ID NO: 162599 - protein, 9 aa, Homo Sapiens
LFHNAVSAY

SEQ ID NO: 162600 - protein, 9 aa, Homo Sapiens
LFHTIGVEF

SEQ ID NO: 162601 - protein, 9 aa, Homo Sapiens
LFIEHSVEV

SEQ ID NO: 162602 - protein, 9 aa, Homo Sapiens
LFIFSVANM

SEQ ID NO: 162603 - protein, 9 aa, Homo Sapiens
LFIHFANVY

SEQ ID NO: 162604 - protein, 9 aa, Homo Sapiens
LFIPRETTY

SEQ ID NO: 162605 - protein, 9 aa, Homo Sapiens
LFKEREKPL

SEQ ID NO: 162606 - protein, 9 aa, Homo Sapiens
LFLDTVSTF

SEQ ID NO: 162607 - protein, 9 aa, Homo Sapiens
LFLEHAHNL

SEQ ID NO: 162608 - protein, 9 aa, Homo Sapiens
LFLEKAMQL

SEQ ID NO: 162609 - protein, 9 aa, Homo Sapiens
LFLPGRMAY

SEQ ID NO: 162610 - protein, 9 aa, Homo Sapiens
LFLPTAAAY

SEQ ID NO: 162611 - protein, 9 aa, Homo Sapiens
LFLTSLHSM

SEQ ID NO: 162612 - protein, 9 aa, Homo Sapiens
LFMDNKNEL

SEQ ID NO: 162613 - protein, 9 aa, Homo Sapiens
LFMIEIMEM

SEQ ID NO: 162614 - protein, 9 aa, Homo Sapiens
LFMPRSTEF

SEQ ID NO: 162615 - protein, 9 aa, Homo Sapiens
LFMPSTSSM

SEQ ID NO: 162616 - protein, 9 aa, Homo Sapiens
LFMSSFQSY

SEQ ID NO: 162617 - protein, 9 aa, Homo Sapiens
LFNDSRVTF

SEQ ID NO: 162618 - protein, 9 aa, Homo Sapiens
LFPANYVEL

SEQ ID NO: 162619 - protein, 9 aa, Homo Sapiens
LFPDQATQL

SEQ ID NO: 162620 - protein, 9 aa, Homo Sapiens
LFPDTPLAL

SEQ ID NO: 162621 - protein, 9 aa, Homo Sapiens
LFPDVVNCM

SEQ ID NO: 162622 - protein, 9 aa, Homo Sapiens
LFPEGIKGM

SEQ ID NO: 162623 - protein, 9 aa, Homo Sapiens
LFPGKVHSL

SEQ ID NO: 162624 - protein, 9 aa, Homo Sapiens
LFPGPSKPF

SEQ ID NO: 162625 - protein, 9 aa, Homo Sapiens
LFPGSNATF

SEQ ID NO: 162626 - protein, 9 aa, Homo Sapiens
LFPGSPAIY

SEQ ID NO: 162627 - protein, 9 aa, Homo Sapiens
LFPHHIGEL

SEQ ID NO: 162628 - protein, 9 aa, Homo Sapiens
LFPKHFVEY

SEQ ID NO: 162629 - protein, 9 aa, Homo Sapiens
LFPLWPAEM

SEQ ID NO: 162630 - protein, 9 aa, Homo Sapiens
LFPVPGSGL

SEQ ID NO: 162631 - protein, 9 aa, Homo Sapiens
LFQDKASEL

SEQ ID NO: 162632 - protein, 9 aa, Homo Sapiens
LFQEMNIEL

SEQ ID NO: 162633 - protein, 9 aa, Homo Sapiens
LFQHICTAY

SEQ ID NO: 162634 - protein, 9 aa, Homo Sapiens
LFTENVLAH

SEQ ID NO: 162635 - protein, 9 aa, Homo Sapiens
LFVDKIREY

SEQ ID NO: 162636 - protein, 9 aa, Homo Sapiens
LFVPRRAPF

SEQ ID NO: 162637 - protein, 9 aa, Homo Sapiens
LFYEAAQEL

SEQ ID NO: 162638 - protein, 9 aa, Homo Sapiens
LFYFSNEKY

SEQ ID NO: 162639 - protein, 9 aa, Homo Sapiens
LFYPYCQAL

SEQ ID NO: 162640 - protein, 9 aa, Homo Sapiens
LLPHYPNWF

SEQ ID NO: 162641 - protein, 9 aa, Homo Sapiens
LLPPYLRVI

SEQ ID NO: 162642 - protein, 9 aa, Homo Sapiens
LSHLQYFYP

SEQ ID NO: 162643 - protein, 9 aa, Homo Sapiens
LSPMSVNAV

SEQ ID NO: 162644 - protein, 9 aa, Homo Sapiens
LSWNKTVEL

SEQ ID NO: 162645 - protein, 9 aa, Homo Sapiens
LTISFGSWM

SEQ ID NO: 162646 - protein, 9 aa, Homo Sapiens
LYAAAAGVL

SEQ ID NO: 162647 - protein, 9 aa, Homo Sapiens
LYAIRTQEY

SEQ ID NO: 162648 - protein, 9 aa, Homo Sapiens
LYAISAVYF

SEQ ID NO: 162649 - protein, 9 aa, Homo Sapiens
LYALQVHCY

SEQ ID NO: 162650 - protein, 9 aa, Homo Sapiens
LYASKIISY

SEQ ID NO: 162651 - protein, 9 aa, Homo Sapiens
LYATVHQSY

SEQ ID NO: 162652 - protein, 9 aa, Homo Sapiens
LYDQISLPF

SEQ ID NO: 162653 - protein, 9 aa, Homo Sapiens
LYFIAPSGH

SEQ ID NO: 162654 - protein, 9 aa, Homo Sapiens
LYFIAPTGH

SEQ ID NO: 162655 - protein, 9 aa, Homo Sapiens
LYFQSKENL

SEQ ID NO: 162656 - protein, 9 aa, Homo Sapiens
LYGPKYTFF

SEQ ID NO: 162657 - protein, 9 aa, Homo Sapiens
LYHAGAVAF

SEQ ID NO: 162658 - protein, 9 aa, Homo Sapiens
LYHEHIIKY

SEQ ID NO: 162659 - protein, 9 aa, Homo Sapiens
LYHFSSSEL

SEQ ID NO: 162660 - protein, 9 aa, Homo Sapiens
LYHLLRQEL

SEQ ID NO: 162661 - protein, 9 aa, Homo Sapiens
LYHWSVESY

SEQ ID NO: 162662 - protein, 9 aa, Homo Sapiens
LYHYYIMEL

SEQ ID NO: 162663 - protein, 9 aa, Homo Sapiens
LYIDDTLTM

SEQ ID NO: 162664 - protein, 9 aa, Homo Sapiens
LYIGSSKTF

SEQ ID NO: 162665 - protein, 9 aa, Homo Sapiens
LYIHHAIDL

SEQ ID NO: 162666 - protein, 9 aa, Homo Sapiens
LYIQRTKSM

SEQ ID NO: 162667 - protein, 9 aa, Homo Sapiens
LYKERMTEL

SEQ ID NO: 162668 - protein, 9 aa, Homo Sapiens
LYLDESNAL

SEQ ID NO: 162669 - protein, 9 aa, Homo Sapiens
LYLFHLITM

SEQ ID NO: 162670 - protein, 9 aa, Homo Sapiens
LYLPATTPY

SEQ ID NO: 162671 - protein, 9 aa, Homo Sapiens
LYLPKETCL

SEQ ID NO: 162672 - protein, 9 aa, Homo Sapiens
LYLPMAQSV

SEQ ID NO: 162673 - protein, 9 aa, Homo Sapiens
LYLSSKTEL

SEQ ID NO: 162674 - protein, 9 aa, Homo Sapiens
LYLTSCVNY

SEQ ID NO: 162675 - protein, 9 aa, Homo Sapiens
LYMNGMYAF

SEQ ID NO: 162676 - protein, 9 aa, Homo Sapiens
LYMPAVGFL

SEQ ID NO: 162677 - protein, 9 aa, Homo Sapiens
LYNIMKEGL

SEQ ID NO: 162678 - protein, 9 aa, Homo Sapiens
LYPAVSAVY

SEQ ID NO: 162679 - protein, 9 aa, Homo Sapiens
LYPDHFHLL

SEQ ID NO: 162680 - protein, 9 aa, Homo Sapiens
LYPEGLAQL

SEQ ID NO: 162681 - protein, 9 aa, Homo Sapiens
LYPEYGAAF

SEQ ID NO: 162682 - protein, 9 aa, Homo Sapiens
LYPIKNLEM

SEQ ID NO: 162683 - protein, 9 aa, Homo Sapiens
LYPKSTHAL

SEQ ID NO: 162684 - protein, 9 aa, Homo Sapiens
LYPLVAKSL

SEQ ID NO: 162685 - protein, 9 aa, Homo Sapiens
LYPPFMIAL

SEQ ID NO: 162686 - protein, 9 aa, Homo Sapiens
LYPSIIQEF

SEQ ID NO: 162687 - protein, 9 aa, Homo Sapiens
LYPTPSNPF

SEQ ID NO: 162688 - protein, 9 aa, Homo Sapiens
LYPWGVVEV

SEQ ID NO: 162689 - protein, 9 aa, Homo Sapiens
LYPYWISAL

SEQ ID NO: 162690 - protein, 9 aa, Homo Sapiens
LYQARIVSH

SEQ ID NO: 162691 - protein, 9 aa, Homo Sapiens
LYQDFVRDY

SEQ ID NO: 162692 - protein, 9 aa, Homo Sapiens
LYQDTHQEY

SEQ ID NO: 162693 - protein, 9 aa, Homo Sapiens
LYQENKREY

SEQ ID NO: 162694 - protein, 9 aa, Homo Sapiens
LYQFNPAFF

SEQ ID NO: 162695 - protein, 9 aa, Homo Sapiens
LYQHAVEYF

SEQ ID NO: 162696 - protein, 9 aa, Homo Sapiens
LYQIQQVTM

SEQ ID NO: 162697 - protein, 9 aa, Homo Sapiens
LYQKEVSHL

SEQ ID NO: 162698 - protein, 9 aa, Homo Sapiens
LYQLQVNTL

SEQ ID NO: 162699 - protein, 9 aa, Homo Sapiens
LYQPRASEM

SEQ ID NO: 162700 - protein, 9 aa, Homo Sapiens
LYQPSAESL

SEQ ID NO: 162701 - protein, 9 aa, Homo Sapiens
LYQSPVKEL

SEQ ID NO: 162702 - protein, 9 aa, Homo Sapiens
LYSDRISEL

SEQ ID NO: 162703 - protein, 9 aa, Homo Sapiens
LYSPQYISY

SEQ ID NO: 162704 - protein, 9 aa, Homo Sapiens
LYTVTGQSW

SEQ ID NO: 162705 - protein, 9 aa, Homo Sapiens
LYYIGGEVF

SEQ ID NO: 162706 - protein, 9 aa, Homo Sapiens
LYYNANRAF

SEQ ID NO: 162707 - protein, 9 aa, Homo Sapiens
LYYQYMETY

SEQ ID NO: 162708 - protein, 9 aa, Homo Sapiens
LYYRDARSY

SEQ ID NO: 162709 - protein, 9 aa, Homo Sapiens
LYYTTVRAL

SEQ ID NO: 162710 - protein, 9 aa, Homo Sapiens
LYYVGGEVY

SEQ ID NO: 162711 - protein, 9 aa, Homo Sapiens
MFCEKAMEL

SEQ ID NO: 162712 - protein, 9 aa, Homo Sapiens
MFFFSRLEY

SEQ ID NO: 162713 - protein, 9 aa, Homo Sapiens
MFHWQATIM

SEQ ID NO: 162714 - protein, 9 aa, Homo Sapiens
MFNIHRGFY

SEQ ID NO: 162715 - protein, 9 aa, Homo Sapiens
MFPDICASH

SEQ ID NO: 162716 - protein, 9 aa, Homo Sapiens
MFPPPGQSY

SEQ ID NO: 162717 - protein, 9 aa, Homo Sapiens
MFQHIEESF

SEQ ID NO: 162718 - protein, 9 aa, Homo Sapiens
MTQIMFETF

SEQ ID NO: 162719 - protein, 9 aa, Homo Sapiens
MYFTYKVRY

SEQ ID NO: 162720 - protein, 9 aa, Homo Sapiens
MYIARQLSF

SEQ ID NO: 162721 - protein, 9 aa, Homo Sapiens
MYIYSGNSL

SEQ ID NO: 162722 - protein, 9 aa, Homo Sapiens
MYLHRPEEY

SEQ ID NO: 162723 - protein, 9 aa, Homo Sapiens
MYNFQLVTL

SEQ ID NO: 162724 - protein, 9 aa, Homo Sapiens
MYPAFAEEY

SEQ ID NO: 162725 - protein, 9 aa, Homo Sapiens
MYPDQVQLL

SEQ ID NO: 162726 - protein, 9 aa, Homo Sapiens
MYPGIADRM

SEQ ID NO: 162727 - protein, 9 aa, Homo Sapiens
MYPKAVQDL

SEQ ID NO: 162728 - protein, 9 aa, Homo Sapiens
MYQDKLASL

SEQ ID NO: 162729 - protein, 9 aa, Homo Sapiens
MYSIMVHAL

SEQ ID NO: 162730 - protein, 9 aa, Homo Sapiens
MYYGLSNFY

SEQ ID NO: 162731 - protein, 9 aa, Homo Sapiens
NFCGKSISY

SEQ ID NO: 162732 - protein, 9 aa, Homo Sapiens
NFFPSGIDF

SEQ ID NO: 162733 - protein, 9 aa, Homo Sapiens
NFFTKATPL

SEQ ID NO: 162734 - protein, 9 aa, Homo Sapiens
NFHASNTHL

SEQ ID NO: 162735 - protein, 9 aa, Homo Sapiens
NFHGEWLEV

SEQ ID NO: 162736 - protein, 9 aa, Homo Sapiens
NFIATVREV

SEQ ID NO: 162737 - protein, 9 aa, Homo Sapiens
NFICPALEF

SEQ ID NO: 162738 - protein, 9 aa, Homo Sapiens
NFIEDVLGY

SEQ ID NO: 162739 - protein, 9 aa, Homo Sapiens
NFIEKVEAL

SEQ ID NO: 162740 - protein, 9 aa, Homo Sapiens
NFIKAIQAY

SEQ ID NO: 162741 - protein, 9 aa, Homo Sapiens
NFIKAMVSY

SEQ ID NO: 162742 - protein, 9 aa, Homo Sapiens
NFIPTGSAF

SEQ ID NO: 162743 - protein, 9 aa, Homo Sapiens
NFIRVLVSY

SEQ ID NO: 162744 - protein, 9 aa, Homo Sapiens
NFITGVGIL

SEQ ID NO: 162745 - protein, 9 aa, Homo Sapiens
NFKTPRGPV

SEQ ID NO: 162746 - protein, 9 aa, Homo Sapiens
NFLAQTEAL

SEQ ID NO: 162747 - protein, 9 aa, Homo Sapiens
NFLESKFSL

SEQ ID NO: 162748 - protein, 9 aa, Homo Sapiens
NFLGAENAF

SEQ ID NO: 162749 - protein, 9 aa, Homo Sapiens
NFLLHVTAL

SEQ ID NO: 162750 - protein, 9 aa, Homo Sapiens
NFLNMSRSM

SEQ ID NO: 162751 - protein, 9 aa, Homo Sapiens
NFLPEALDF

SEQ ID NO: 162752 - protein, 9 aa, Homo Sapiens
NFLSTLTSF

SEQ ID NO: 162753 - protein, 9 aa, Homo Sapiens
NFMKPTQEM

SEQ ID NO: 162754 - protein, 9 aa, Homo Sapiens
NFMLHLVSM

SEQ ID NO: 162755 - protein, 9 aa, Homo Sapiens
NFNTSVQAL

SEQ ID NO: 162756 - protein, 9 aa, Homo Sapiens
NFPEHIFPA

SEQ ID NO: 162757 - protein, 9 aa, Homo Sapiens
NFPGIVTSF

SEQ ID NO: 162758 - protein, 9 aa, Homo Sapiens
NFPIKARSL

SEQ ID NO: 162759 - protein, 9 aa, Homo Sapiens
NFPKVATSF

SEQ ID NO: 162760 - protein, 9 aa, Homo Sapiens
NFPNGVTDF

SEQ ID NO: 162761 - protein, 9 aa, Homo Sapiens
NFPNIRDAI

SEQ ID NO: 162762 - protein, 9 aa, Homo Sapiens
NFPQYVMDV

SEQ ID NO: 162763 - protein, 9 aa, Homo Sapiens
NFPTNLHPM

SEQ ID NO: 162764 - protein, 9 aa, Homo Sapiens
NFPVGQRVL

SEQ ID NO: 162765 - protein, 9 aa, Homo Sapiens
NFQAIRVTL

SEQ ID NO: 162766 - protein, 9 aa, Homo Sapiens
NFQAIVISL

SEQ ID NO: 162767 - protein, 9 aa, Homo Sapiens
NFQALAAEF

SEQ ID NO: 162768 - protein, 9 aa, Homo Sapiens
NFQDTVNTL

SEQ ID NO: 162769 - protein, 9 aa, Homo Sapiens
NFQEPVQPL

SEQ ID NO: 162770 - protein, 9 aa, Homo Sapiens
NFQEYVTFL

SEQ ID NO: 162771 - protein, 9 aa, Homo Sapiens
NFQPFALNH

SEQ ID NO: 162772 - protein, 9 aa, Homo Sapiens
NFQTAKEAL

SEQ ID NO: 162773 - protein, 9 aa, Homo Sapiens
NFQTAKESL

SEQ ID NO: 162774 - protein, 9 aa, Homo Sapiens
NFQWPVLAF

SEQ ID NO: 162775 - protein, 9 aa, Homo Sapiens
NFYCPGSAL

SEQ ID NO: 162776 - protein, 9 aa, Homo Sapiens
NFYNFASSF

SEQ ID NO: 162777 - protein, 9 aa, Homo Sapiens
NFYSTEVSV

SEQ ID NO: 162778 - protein, 9 aa, Homo Sapiens
NMNTMGHMM

SEQ ID NO: 162779 - protein, 9 aa, Homo Sapiens
NYAEYQVCL

SEQ ID NO: 162780 - protein, 9 aa, Homo Sapiens
NYETMGRAL

SEQ ID NO: 162781 - protein, 9 aa, Homo Sapiens
NYFFDAAKL

SEQ ID NO: 162782 - protein, 9 aa, Homo Sapiens
NYFGAAGRL

SEQ ID NO: 162783 - protein, 9 aa, Homo Sapiens
NYFLRLCSF

SEQ ID NO: 162784 - protein, 9 aa, Homo Sapiens
NYFPGGVAL

SEQ ID NO: 162785 - protein, 9 aa, Homo Sapiens
NYFQQANEL

SEQ ID NO: 162786 - protein, 9 aa, Homo Sapiens
NYHAMTEFL

SEQ ID NO: 162787 - protein, 9 aa, Homo Sapiens
NYHATTEFL

SEQ ID NO: 162788 - protein, 9 aa, Homo Sapiens
NYHWQETAY

SEQ ID NO: 162789 - protein, 9 aa, Homo Sapiens
NYIDKVRFL

SEQ ID NO: 162790 - protein, 9 aa, Homo Sapiens
NYIEFTRIL

SEQ ID NO: 162791 - protein, 9 aa, Homo Sapiens
NYIEGTKML

SEQ ID NO: 162792 - protein, 9 aa, Homo Sapiens
NYIEKVVAI

SEQ ID NO: 162793 - protein, 9 aa, Homo Sapiens
NYIHVGAQL

SEQ ID NO: 162794 - protein, 9 aa, Homo Sapiens
NYIMQSHSL

SEQ ID NO: 162795 - protein, 9 aa, Homo Sapiens
NYIPEVRIM

SEQ ID NO: 162796 - protein, 9 aa, Homo Sapiens
NYIRDRLAL

SEQ ID NO: 162797 - protein, 9 aa, Homo Sapiens
NYITPVNSL

SEQ ID NO: 162798 - protein, 9 aa, Homo Sapiens
NYLNQGVVH

SEQ ID NO: 162799 - protein, 9 aa, Homo Sapiens
NYMAHLVEV

SEQ ID NO: 162800 - protein, 9 aa, Homo Sapiens
NYMMRNAVL

SEQ ID NO: 162801 - protein, 9 aa, Homo Sapiens
NYMPGQLTI

SEQ ID NO: 162802 - protein, 9 aa, Homo Sapiens
NYNFQYISL

SEQ ID NO: 162803 - protein, 9 aa, Homo Sapiens
NYNPAQQAF

SEQ ID NO: 162804 - protein, 9 aa, Homo Sapiens
NYNTIFQYY

SEQ ID NO: 162805 - protein, 9 aa, Homo Sapiens
NYPAFMMEM

SEQ ID NO: 162806 - protein, 9 aa, Homo Sapiens
NYPDTTIDL

SEQ ID NO: 162807 - protein, 9 aa, Homo Sapiens
NYPFPGETF

SEQ ID NO: 162808 - protein, 9 aa, Homo Sapiens
NYPGLSISL

SEQ ID NO: 162809 - protein, 9 aa, Homo Sapiens
NYPHFFLDF

SEQ ID NO: 162810 - protein, 9 aa, Homo Sapiens
NYPIGTNAI

SEQ ID NO: 162811 - protein, 9 aa, Homo Sapiens
NYPSAFHSV

SEQ ID NO: 162812 - protein, 9 aa, Homo Sapiens
NYPVTGLAF

SEQ ID NO: 162813 - protein, 9 aa, Homo Sapiens
NYQAYRSYL

SEQ ID NO: 162814 - protein, 9 aa, Homo Sapiens
NYQEVSRTL

SEQ ID NO: 162815 - protein, 9 aa, Homo Sapiens
NYQIVVSNL

SEQ ID NO: 162816 - protein, 9 aa, Homo Sapiens
NYQTLKTSL

SEQ ID NO: 162817 - protein, 9 aa, Homo Sapiens
NYQVQFVTL

SEQ ID NO: 162818 - protein, 9 aa, Homo Sapiens
NYQVTNSMF

SEQ ID NO: 162819 - protein, 9 aa, Homo Sapiens
NYSPYVNYF

SEQ ID NO: 162820 - protein, 9 aa, Homo Sapiens
NYTDRIQVL

SEQ ID NO: 162821 - protein, 9 aa, Homo Sapiens
NYVDLVSSL

SEQ ID NO: 162822 - protein, 9 aa, Homo Sapiens
NYVESIMHY

SEQ ID NO: 162823 - protein, 9 aa, Homo Sapiens
NYVPEVSAL

SEQ ID NO: 162824 - protein, 9 aa, Homo Sapiens
NYYPGSLFL

SEQ ID NO: 162825 - protein, 9 aa, Homo Sapiens
NYYTKAIDM

SEQ ID NO: 162826 - protein, 9 aa, Homo Sapiens
NYYTPITPH

SEQ ID NO: 162827 - protein, 9 aa, Homo Sapiens
PIRLLAAAA

SEQ ID NO: 162828 - protein, 9 aa, Homo Sapiens
PNYFLSIPI

SEQ ID NO: 162829 - protein, 9 aa, Homo Sapiens
PYNTSLVEM

SEQ ID NO: 162830 - protein, 9 aa, Homo Sapiens
PYYASAFSM

SEQ ID NO: 162831 - protein, 9 aa, Homo Sapiens
QFIDGRLDL

SEQ ID NO: 162832 - protein, 9 aa, Homo Sapiens
QFLAAIESL

SEQ ID NO: 162833 - protein, 9 aa, Homo Sapiens
QFLDAAKAL

SEQ ID NO: 162834 - protein, 9 aa, Homo Sapiens
QFLEQALQM

SEQ ID NO: 162835 - protein, 9 aa, Homo Sapiens
QFLFSLVEH

SEQ ID NO: 162836 - protein, 9 aa, Homo Sapiens
QFLPRTITL

SEQ ID NO: 162837 - protein, 9 aa, Homo Sapiens
QFLRGARAM

SEQ ID NO: 162838 - protein, 9 aa, Homo Sapiens
QFPAWISQF

SEQ ID NO: 162839 - protein, 9 aa, Homo Sapiens
QFPDFNNYL

SEQ ID NO: 162840 - protein, 9 aa, Homo Sapiens
QFPDMILSA

SEQ ID NO: 162841 - protein, 9 aa, Homo Sapiens
QFPELMGVF

SEQ ID NO: 162842 - protein, 9 aa, Homo Sapiens
QFPLYNNDI

SEQ ID NO: 162843 - protein, 9 aa, Homo Sapiens
QFQKVITEY

SEQ ID NO: 162844 - protein, 9 aa, Homo Sapiens
QFQPKLTDF

SEQ ID NO: 162845 - protein, 9 aa, Homo Sapiens
QYFARMCSL

SEQ ID NO: 162846 - protein, 9 aa, Homo Sapiens
QYFTARTSL

SEQ ID NO: 162847 - protein, 9 aa, Homo Sapiens
QYLELAHSL

SEQ ID NO: 162848 - protein, 9 aa, Homo Sapiens
QYLSQKKTI

SEQ ID NO: 162849 - protein, 9 aa, Homo Sapiens
QYMEEIYHR

SEQ ID NO: 162850 - protein, 9 aa, Homo Sapiens
QYMERLQLL

SEQ ID NO: 162851 - protein, 9 aa, Homo Sapiens
QYPDFNNYL

SEQ ID NO: 162852 - protein, 9 aa, Homo Sapiens
QYPEGYLEA

SEQ ID NO: 162853 - protein, 9 aa, Homo Sapiens
QYPENILSF

SEQ ID NO: 162854 - protein, 9 aa, Homo Sapiens
QYPGDIGCF

SEQ ID NO: 162855 - protein, 9 aa, Homo Sapiens
QYPGRSLVF

SEQ ID NO: 162856 - protein, 9 aa, Homo Sapiens
QYPWGVAEV

SEQ ID NO: 162857 - protein, 9 aa, Homo Sapiens
QYQDNIKEL

SEQ ID NO: 162858 - protein, 9 aa, Homo Sapiens
QYQPPAPAL

SEQ ID NO: 162859 - protein, 9 aa, Homo Sapiens
QYQRMLSTL

SEQ ID NO: 162860 - protein, 9 aa, Homo Sapiens
QYVCQQTGL

SEQ ID NO: 162861 - protein, 9 aa, Homo Sapiens
QYVIQLTSM

SEQ ID NO: 162862 - protein, 9 aa, Homo Sapiens
QYYALEVSY

SEQ ID NO: 162863 - protein, 9 aa, Homo Sapiens
QYYQNDIPY

SEQ ID NO: 162864 - protein, 9 aa, Homo Sapiens
QYYSYFTSH

SEQ ID NO: 162865 - protein, 9 aa, Homo Sapiens
RFFAQSQSL

SEQ ID NO: 162866 - protein, 9 aa, Homo Sapiens
RFFDGAKDV

SEQ ID NO: 162867 - protein, 9 aa, Homo Sapiens
RFFESFGDL

SEQ ID NO: 162868 - protein, 9 aa, Homo Sapiens
RFFTSSTSL

SEQ ID NO: 162869 - protein, 9 aa, Homo Sapiens
RFHEMHVAL

SEQ ID NO: 162870 - protein, 9 aa, Homo Sapiens
RFHTITTSY

SEQ ID NO: 162871 - protein, 9 aa, Homo Sapiens
RFIAGTGCL

SEQ ID NO: 162872 - protein, 9 aa, Homo Sapiens
RFIAVVHPL

SEQ ID NO: 162873 - protein, 9 aa, Homo Sapiens
RFIEATKQY

SEQ ID NO: 162874 - protein, 9 aa, Homo Sapiens
RFIGATANF

SEQ ID NO: 162875 - protein, 9 aa, Homo Sapiens
RFIGAVNNM

SEQ ID NO: 162876 - protein, 9 aa, Homo Sapiens
RFIGLTNSF

SEQ ID NO: 162877 - protein, 9 aa, Homo Sapiens
RFIPSAYPY

SEQ ID NO: 162878 - protein, 9 aa, Homo Sapiens
RFIPYTEEF

SEQ ID NO: 162879 - protein, 9 aa, Homo Sapiens
RFLDKALEL

SEQ ID NO: 162880 - protein, 9 aa, Homo Sapiens
RFLENALAV

SEQ ID NO: 162881 - protein, 9 aa, Homo Sapiens
RFLPEALFL

SEQ ID NO: 162882 - protein, 9 aa, Homo Sapiens
RFLVGTQSL

SEQ ID NO: 162883 - protein, 9 aa, Homo Sapiens
RFLYSNIAF

SEQ ID NO: 162884 - protein, 9 aa, Homo Sapiens
RFMDGHITF

SEQ ID NO: 162885 - protein, 9 aa, Homo Sapiens
RFMEETANF

SEQ ID NO: 162886 - protein, 9 aa, Homo Sapiens
RFNSITSAY

SEQ ID NO: 162887 - protein, 9 aa, Homo Sapiens
RFPDFVRDF

SEQ ID NO: 162888 - protein, 9 aa, Homo Sapiens
RFPDGTNGL

SEQ ID NO: 162889 - protein, 9 aa, Homo Sapiens
RFPDLTVEL

SEQ ID NO: 162890 - protein, 9 aa, Homo Sapiens
RFPDPRMHY

SEQ ID NO: 162891 - protein, 9 aa, Homo Sapiens
RFPDTVKQM

SEQ ID NO: 162892 - protein, 9 aa, Homo Sapiens
RFPDTVSTV

SEQ ID NO: 162893 - protein, 9 aa, Homo Sapiens
RFPDVANGF

SEQ ID NO: 162894 - protein, 9 aa, Homo Sapiens
RFPEAFSSI

SEQ ID NO: 162895 - protein, 9 aa, Homo Sapiens
RFPEHVREI

SEQ ID NO: 162896 - protein, 9 aa, Homo Sapiens
RFPELSLAL

SEQ ID NO: 162897 - protein, 9 aa, Homo Sapiens
RFPLNILPM

SEQ ID NO: 162898 - protein, 9 aa, Homo Sapiens
RFPNFTNQL

SEQ ID NO: 162899 - protein, 9 aa, Homo Sapiens
RFPQHYKSL

SEQ ID NO: 162900 - protein, 9 aa, Homo Sapiens
RFQDLIREL

SEQ ID NO: 162901 - protein, 9 aa, Homo Sapiens
RFQDQVLDL

SEQ ID NO: 162902 - protein, 9 aa, Homo Sapiens
RFQEILNCL

SEQ ID NO: 162903 - protein, 9 aa, Homo Sapiens
RFQNYMVAL

SEQ ID NO: 162904 - protein, 9 aa, Homo Sapiens
RFQSLGVAF

SEQ ID NO: 162905 - protein, 9 aa, Homo Sapiens
RFSLNTVEL

SEQ ID NO: 162906 - protein, 9 aa, Homo Sapiens
RFYAFGRVF

SEQ ID NO: 162907 - protein, 9 aa, Homo Sapiens
RFYEGVVEL

SEQ ID NO: 162908 - protein, 9 aa, Homo Sapiens
RIIEETLAL

SEQ ID NO: 162909 - protein, 9 aa, Homo Sapiens
RLPPYSSQL

SEQ ID NO: 162910 - protein, 9 aa, Homo Sapiens
RMLAAATAF

SEQ ID NO: 162911 - protein, 9 aa, Homo Sapiens
RMMEIAKAM

SEQ ID NO: 162912 - protein, 9 aa, Homo Sapiens
RMPPFTQAF

SEQ ID NO: 162913 - protein, 9 aa, Homo Sapiens
RWMDEAQAL

SEQ ID NO: 162914 - protein, 9 aa, Homo Sapiens
RWPDYVREL

SEQ ID NO: 162915 - protein, 9 aa, Homo Sapiens
RWPKKSAEF

SEQ ID NO: 162916 - protein, 9 aa, Homo Sapiens
RYADRVKEL

SEQ ID NO: 162917 - protein, 9 aa, Homo Sapiens
RYAEAVQLL

SEQ ID NO: 162918 - protein, 9 aa, Homo Sapiens
RYAEFSSAL

SEQ ID NO: 162919 - protein, 9 aa, Homo Sapiens
RYAFSGVAF

SEQ ID NO: 162920 - protein, 9 aa, Homo Sapiens
RYCFQITSF

SEQ ID NO: 162921 - protein, 9 aa, Homo Sapiens
RYFDHALTL

SEQ ID NO: 162922 - protein, 9 aa, Homo Sapiens
RYFGPAAAL

SEQ ID NO: 162923 - protein, 9 aa, Homo Sapiens
RYFIPVSCF

SEQ ID NO: 162924 - protein, 9 aa, Homo Sapiens
RYFSTAVSR

SEQ ID NO: 162925 - protein, 9 aa, Homo Sapiens
RYHTGSLAF

SEQ ID NO: 162926 - protein, 9 aa, Homo Sapiens
RYIANTVEL

SEQ ID NO: 162927 - protein, 9 aa, Homo Sapiens
RYIEQATVH

SEQ ID NO: 162928 - protein, 9 aa, Homo Sapiens
RYIGKTMDY

SEQ ID NO: 162929 - protein, 9 aa, Homo Sapiens
RYIPDAMNL

SEQ ID NO: 162930 - protein, 9 aa, Homo Sapiens
RYIPTAAAF

SEQ ID NO: 162931 - protein, 9 aa, Homo Sapiens
RYIQGILNV

SEQ ID NO: 162932 - protein, 9 aa, Homo Sapiens
RYLEKCIAY

SEQ ID NO: 162933 - protein, 9 aa, Homo Sapiens
RYLESARCY

SEQ ID NO: 162934 - protein, 9 aa, Homo Sapiens
RYLGGSMDL

SEQ ID NO: 162935 - protein, 9 aa, Homo Sapiens
RYLGKVLEL

SEQ ID NO: 162936 - protein, 9 aa, Homo Sapiens
RYLPQCSYF

SEQ ID NO: 162937 - protein, 9 aa, Homo Sapiens
RYLSKVLEL

SEQ ID NO: 162938 - protein, 9 aa, Homo Sapiens
RYLTVAAVF

SEQ ID NO: 162939 - protein, 9 aa, Homo Sapiens
RYLYMVMEY

SEQ ID NO: 162940 - protein, 9 aa, Homo Sapiens
RYMAFAHDL

SEQ ID NO: 162941 - protein, 9 aa, Homo Sapiens
RYMEVSGNL

SEQ ID NO: 162942 - protein, 9 aa, Homo Sapiens
RYMKPGKEL

SEQ ID NO: 162943 - protein, 9 aa, Homo Sapiens
RYMNHMQSL

SEQ ID NO: 162944 - protein, 9 aa, Homo Sapiens
RYMSINTHL

SEQ ID NO: 162945 - protein, 9 aa, Homo Sapiens
RYMVHLLEL

SEQ ID NO: 162946 - protein, 9 aa, Homo Sapiens
RYNSQLLSF

SEQ ID NO: 162947 - protein, 9 aa, Homo Sapiens
RYNVMHVAA

SEQ ID NO: 162948 - protein, 9 aa, Homo Sapiens
RYPCFFNTL

SEQ ID NO: 162949 - protein, 9 aa, Homo Sapiens
RYPDIQASY

SEQ ID NO: 162950 - protein, 9 aa, Homo Sapiens
RYPDNLKHL

SEQ ID NO: 162951 - protein, 9 aa, Homo Sapiens
RYPDSILEH

SEQ ID NO: 162952 - protein, 9 aa, Homo Sapiens
RYPEETLSL

SEQ ID NO: 162953 - protein, 9 aa, Homo Sapiens
RYPPAANEL

SEQ ID NO: 162954 - protein, 9 aa, Homo Sapiens
RYPTSIASL

SEQ ID NO: 162955 - protein, 9 aa, Homo Sapiens
RYQATGLHF

SEQ ID NO: 162956 - protein, 9 aa, Homo Sapiens
RYQDAIRVF

SEQ ID NO: 162957 - protein, 9 aa, Homo Sapiens
RYQEALSEL

SEQ ID NO: 162958 - protein, 9 aa, Homo Sapiens
RYQEDVQQL

SEQ ID NO: 162959 - protein, 9 aa, Homo Sapiens
RYQEFVRAL

SEQ ID NO: 162960 - protein, 9 aa, Homo Sapiens
RYQEKISAL

SEQ ID NO: 162961 - protein, 9 aa, Homo Sapiens
RYQEVIQEL

SEQ ID NO: 162962 - protein, 9 aa, Homo Sapiens
RYQFIEEAF

SEQ ID NO: 162963 - protein, 9 aa, Homo Sapiens
RYRPGTVAL

SEQ ID NO: 162964 - protein, 9 aa, Homo Sapiens
RYSEAVFYY

SEQ ID NO: 162965 - protein, 9 aa, Homo Sapiens
RYSEYAEEF

SEQ ID NO: 162966 - protein, 9 aa, Homo Sapiens
RYSVFVNEL

SEQ ID NO: 162967 - protein, 9 aa, Homo Sapiens
RYTFYVLEF

SEQ ID NO: 162968 - protein, 9 aa, Homo Sapiens
RYTLQASTF

SEQ ID NO: 162969 - protein, 9 aa, Homo Sapiens
RYTVQFTTM

SEQ ID NO: 162970 - protein, 9 aa, Homo Sapiens
RYTVSNLSM

SEQ ID NO: 162971 - protein, 9 aa, Homo Sapiens
RYVAIARAL

SEQ ID NO: 162972 - protein, 9 aa, Homo Sapiens
RYVDQVLQL

SEQ ID NO: 162973 - protein, 9 aa, Homo Sapiens
RYVDRVTEF

SEQ ID NO: 162974 - protein, 9 aa, Homo Sapiens
RYVPRASYF

SEQ ID NO: 162975 - protein, 9 aa, Homo Sapiens
RYVWDYTEL

SEQ ID NO: 162976 - protein, 9 aa, Homo Sapiens
RYWNSYTEF

SEQ ID NO: 162977 - protein, 9 aa, Homo Sapiens
RYWSAVTSH

SEQ ID NO: 162978 - protein, 9 aa, Homo Sapiens
RYYAFDEAF

SEQ ID NO: 162979 - protein, 9 aa, Homo Sapiens
RYYDDPREY

SEQ ID NO: 162980 - protein, 9 aa, Homo Sapiens
RYYHCAVTL

SEQ ID NO: 162981 - protein, 9 aa, Homo Sapiens
RYYPSGDAF

SEQ ID NO: 162982 - protein, 9 aa, Homo Sapiens
RYYSSEYHY

SEQ ID NO: 162983 - protein, 9 aa, Homo Sapiens
SFAAEAIAM

SEQ ID NO: 162984 - protein, 9 aa, Homo Sapiens
SFAAKQREL

SEQ ID NO: 162985 - protein, 9 aa, Homo Sapiens
SFAAVIQAL

SEQ ID NO: 162986 - protein, 9 aa, Homo Sapiens
SFADFGSAL

SEQ ID NO: 162987 - protein, 9 aa, Homo Sapiens
SFFGAASQY

SEQ ID NO: 162988 - protein, 9 aa, Homo Sapiens
SFFGGSNPF

SEQ ID NO: 162989 - protein, 9 aa, Homo Sapiens
SFFGNVMSM

SEQ ID NO: 162990 - protein, 9 aa, Homo Sapiens
SFFLGKVCF

SEQ ID NO: 162991 - protein, 9 aa, Homo Sapiens
SFFPKSPAL

SEQ ID NO: 162992 - protein, 9 aa, Homo Sapiens
SFFPKVLEM

SEQ ID NO: 162993 - protein, 9 aa, Homo Sapiens
SFFSTPSEL

SEQ ID NO: 162994 - protein, 9 aa, Homo Sapiens
SFFTNANSY

SEQ ID NO: 162995 - protein, 9 aa, Homo Sapiens
SFGSGFSSF

SEQ ID NO: 162996 - protein, 9 aa, Homo Sapiens
SFGYQITSF

SEQ ID NO: 162997 - protein, 9 aa, Homo Sapiens
SFHAAGLQM

SEQ ID NO: 162998 - protein, 9 aa, Homo Sapiens
SFHHNVAAL

SEQ ID NO: 162999 - protein, 9 aa, Homo Sapiens
SFHNIHNTF

SEQ ID NO: 163000 - protein, 9 aa, Homo Sapiens
SFHQPTQPV

SEQ ID NO: 163001 - protein, 9 aa, Homo Sapiens
SFHTHVKEL

SEQ ID NO: 163002 - protein, 9 aa, Homo Sapiens
SFIAAGICF

SEQ ID NO: 163003 - protein, 9 aa, Homo Sapiens
SFIAFARVF

SEQ ID NO: 163004 - protein, 9 aa, Homo Sapiens
SFIENSSAL

SEQ ID NO: 163005 - protein, 9 aa, Homo Sapiens
SFIERLVEM

SEQ ID NO: 163006 - protein, 9 aa, Homo Sapiens
SFIFGVTNF

SEQ ID NO: 163007 - protein, 9 aa, Homo Sapiens
SFIHAAMGM

SEQ ID NO: 163008 - protein, 9 aa, Homo Sapiens
SFIKEANTL

SEQ ID NO: 163009 - protein, 9 aa, Homo Sapiens
SFIKRNTPL

SEQ ID NO: 163010 - protein, 9 aa, Homo Sapiens
SFILKANEL

SEQ ID NO: 163011 - protein, 9 aa, Homo Sapiens
SFIPAVNDL

SEQ ID NO: 163012 - protein, 9 aa, Homo Sapiens
SFIQGTTTM

SEQ ID NO: 163013 - protein, 9 aa, Homo Sapiens
SFISEAESL

SEQ ID NO: 163014 - protein, 9 aa, Homo Sapiens
SFISFANSR

SEQ ID NO: 163015 - protein, 9 aa, Homo Sapiens
SFISVIKEM

SEQ ID NO: 163016 - protein, 9 aa, Homo Sapiens
SFKNQIATH

SEQ ID NO: 163017 - protein, 9 aa, Homo Sapiens
SFLAAAETL

SEQ ID NO: 163018 - protein, 9 aa, Homo Sapiens
SFLATGSNL

SEQ ID NO: 163019 - protein, 9 aa, Homo Sapiens
SFLATITSF

SEQ ID NO: 163020 - protein, 9 aa, Homo Sapiens
SFLDLARNI

SEQ ID NO: 163021 - protein, 9 aa, Homo Sapiens
SFLDSCNSL

SEQ ID NO: 163022 - protein, 9 aa, Homo Sapiens
SFLEDARAY

SEQ ID NO: 163023 - protein, 9 aa, Homo Sapiens
SFLEKTAVL

SEQ ID NO: 163024 - protein, 9 aa, Homo Sapiens
SFLETNVPL

SEQ ID NO: 163025 - protein, 9 aa, Homo Sapiens
SFLFTVITF

SEQ ID NO: 163026 - protein, 9 aa, Homo Sapiens
SFLNKASAV

SEQ ID NO: 163027 - protein, 9 aa, Homo Sapiens
SFLNRYLSL

SEQ ID NO: 163028 - protein, 9 aa, Homo Sapiens
SFLPLAHMF

SEQ ID NO: 163029 - protein, 9 aa, Homo Sapiens
SFLPSGSEM

SEQ ID NO: 163030 - protein, 9 aa, Homo Sapiens
SFLSEARSL

SEQ ID NO: 163031 - protein, 9 aa, Homo Sapiens
SFMDPASAL

SEQ ID NO: 163032 - protein, 9 aa, Homo Sapiens
SFMDVSNPF

SEQ ID NO: 163033 - protein, 9 aa, Homo Sapiens
SFMEGAIIY

SEQ ID NO: 163034 - protein, 9 aa, Homo Sapiens
SFMGMVISH

SEQ ID NO: 163035 - protein, 9 aa, Homo Sapiens
SFMIMKTNF

SEQ ID NO: 163036 - protein, 9 aa, Homo Sapiens
SFMKNTKSV

SEQ ID NO: 163037 - protein, 9 aa, Homo Sapiens
SFMSGADSF

SEQ ID NO: 163038 - protein, 9 aa, Homo Sapiens
SFMYAHLAF

SEQ ID NO: 163039 - protein, 9 aa, Homo Sapiens
SFNAYENHL

SEQ ID NO: 163040 - protein, 9 aa, Homo Sapiens
SFNKMSIEY

SEQ ID NO: 163041 - protein, 9 aa, Homo Sapiens
SFNSSFTSL

SEQ ID NO: 163042 - protein, 9 aa, Homo Sapiens
SFPAHRAVL

SEQ ID NO: 163043 - protein, 9 aa, Homo Sapiens
SFPDNPRKL

SEQ ID NO: 163044 - protein, 9 aa, Homo Sapiens
SFPEHMANV

SEQ ID NO: 163045 - protein, 9 aa, Homo Sapiens
SFPELGAAL

SEQ ID NO: 163046 - protein, 9 aa, Homo Sapiens
SFPELNAAF

SEQ ID NO: 163047 - protein, 9 aa, Homo Sapiens
SFPENLRHL

SEQ ID NO: 163048 - protein, 9 aa, Homo Sapiens
SFPEVFTTY

SEQ ID NO: 163049 - protein, 9 aa, Homo Sapiens
SFPHMVLSL

SEQ ID NO: 163050 - protein, 9 aa, Homo Sapiens
SFPHPLPSL

SEQ ID NO: 163051 - protein, 9 aa, Homo Sapiens
SFPHTTPSM

SEQ ID NO: 163052 - protein, 9 aa, Homo Sapiens
SFPIFISAL

SEQ ID NO: 163053 - protein, 9 aa, Homo Sapiens
SFPNYGLSH

SEQ ID NO: 163054 - protein, 9 aa, Homo Sapiens
SFPPETQAL

SEQ ID NO: 163055 - protein, 9 aa, Homo Sapiens
SFPQLRATM

SEQ ID NO: 163056 - protein, 9 aa, Homo Sapiens
SFPQPAAVY

SEQ ID NO: 163057 - protein, 9 aa, Homo Sapiens
SFPQYSPKM

SEQ ID NO: 163058 - protein, 9 aa, Homo Sapiens
SFPTSIKCL

SEQ ID NO: 163059 - protein, 9 aa, Homo Sapiens
SFPVNYKSL

SEQ ID NO: 163060 - protein, 9 aa, Homo Sapiens
SFPVRGTPM

SEQ ID NO: 163061 - protein, 9 aa, Homo Sapiens
SFQDFVSHF

SEQ ID NO: 163062 - protein, 9 aa, Homo Sapiens
SFQENIAQL

SEQ ID NO: 163063 - protein, 9 aa, Homo Sapiens
SFQEVREYM

SEQ ID NO: 163064 - protein, 9 aa, Homo Sapiens
SFQFAHLEF

SEQ ID NO: 163065 - protein, 9 aa, Homo Sapiens
SFQGMVTSF

SEQ ID NO: 163066 - protein, 9 aa, Homo Sapiens
SFRSQMLAM

SEQ ID NO: 163067 - protein, 9 aa, Homo Sapiens
SFSEFTSSL

SEQ ID NO: 163068 - protein, 9 aa, Homo Sapiens
SFSHSFSAL

SEQ ID NO: 163069 - protein, 9 aa, Homo Sapiens
SFSNAARVL

SEQ ID NO: 163070 - protein, 9 aa, Homo Sapiens
SFSPGAGAF

SEQ ID NO: 163071 - protein, 9 aa, Homo Sapiens
SFVDQVREI

SEQ ID NO: 163072 - protein, 9 aa, Homo Sapiens
SFVDSVGVM

SEQ ID NO: 163073 - protein, 9 aa, Homo Sapiens
SFVIRALGF

SEQ ID NO: 163074 - protein, 9 aa, Homo Sapiens
SFVWHALDY

SEQ ID NO: 163075 - protein, 9 aa, Homo Sapiens
SFYDHALHL

SEQ ID NO: 163076 - protein, 9 aa, Homo Sapiens
SHREPPLEL

SEQ ID NO: 163077 - protein, 9 aa, Homo Sapiens
SLPAYLNSL

SEQ ID NO: 163078 - protein, 9 aa, Homo Sapiens
SMIENVLAF

SEQ ID NO: 163079 - protein, 9 aa, Homo Sapiens
SMITGVAAL

SEQ ID NO: 163080 - protein, 9 aa, Homo Sapiens
SMPLYAVMY

SEQ ID NO: 163081 - protein, 9 aa, Homo Sapiens
SPGAAVVML

SEQ ID NO: 163082 - protein, 9 aa, Homo Sapiens
SVPAFASSL

SEQ ID NO: 163083 - protein, 9 aa, Homo Sapiens
SWIDDTSAF

SEQ ID NO: 163084 - protein, 9 aa, Homo Sapiens
SWIQGVLSH

SEQ ID NO: 163085 - protein, 9 aa, Homo Sapiens
SWPDGMLSM

SEQ ID NO: 163086 - protein, 9 aa, Homo Sapiens
SWPTYPQLY

SEQ ID NO: 163087 - protein, 9 aa, Homo Sapiens
SYADNILSF

SEQ ID NO: 163088 - protein, 9 aa, Homo Sapiens
SYAVGLAAL

SEQ ID NO: 163089 - protein, 9 aa, Homo Sapiens
SYAVMQISM

SEQ ID NO: 163090 - protein, 9 aa, Homo Sapiens
SYEAQITAL

SEQ ID NO: 163091 - protein, 9 aa, Homo Sapiens
SYEFMRRSL

SEQ ID NO: 163092 - protein, 9 aa, Homo Sapiens
SYENMVTEI

SEQ ID NO: 163093 - protein, 9 aa, Homo Sapiens
SYFDPREAY

SEQ ID NO: 163094 - protein, 9 aa, Homo Sapiens
SYFGSFSSL

SEQ ID NO: 163095 - protein, 9 aa, Homo Sapiens
SYFMATNSL

SEQ ID NO: 163096 - protein, 9 aa, Homo Sapiens
SYFPKILTF

SEQ ID NO: 163097 - protein, 9 aa, Homo Sapiens
SYFSAPNSY

SEQ ID NO: 163098 - protein, 9 aa, Homo Sapiens
SYFSSTKTL

SEQ ID NO: 163099 - protein, 9 aa, Homo Sapiens
SYGAAGLAF

SEQ ID NO: 163100 - protein, 9 aa, Homo Sapiens
SYGLQHNCL

SEQ ID NO: 163101 - protein, 9 aa, Homo Sapiens
SYHDGALVV

SEQ ID NO: 163102 - protein, 9 aa, Homo Sapiens
SYHLVGISF

SEQ ID NO: 163103 - protein, 9 aa, Homo Sapiens
SYHPALNAI

SEQ ID NO: 163104 - protein, 9 aa, Homo Sapiens
SYHPSGLSL

SEQ ID NO: 163105 - protein, 9 aa, Homo Sapiens
SYHSYVIGF

SEQ ID NO: 163106 - protein, 9 aa, Homo Sapiens
SYHVKTAFF

SEQ ID NO: 163107 - protein, 9 aa, Homo Sapiens
SYHVSAQNL

SEQ ID NO: 163108 - protein, 9 aa, Homo Sapiens
SYICALIAM

SEQ ID NO: 163109 - protein, 9 aa, Homo Sapiens
SYIEFPAVM

SEQ ID NO: 163110 - protein, 9 aa, Homo Sapiens
SYIGSHREL

SEQ ID NO: 163111 - protein, 9 aa, Homo Sapiens
SYIHTSASL

SEQ ID NO: 163112 - protein, 9 aa, Homo Sapiens
SYIIGTSSV

SEQ ID NO: 163113 - protein, 9 aa, Homo Sapiens
SYIQGGRPF

SEQ ID NO: 163114 - protein, 9 aa, Homo Sapiens
SYISEVKEV

SEQ ID NO: 163115 - protein, 9 aa, Homo Sapiens
SYISKVDVL

SEQ ID NO: 163116 - protein, 9 aa, Homo Sapiens
SYISRTNQL

SEQ ID NO: 163117 - protein, 9 aa, Homo Sapiens
SYIYGAQHL

SEQ ID NO: 163118 - protein, 9 aa, Homo Sapiens
SYLAESLEL

SEQ ID NO: 163119 - protein, 9 aa, Homo Sapiens
SYLDFTNPK

SEQ ID NO: 163120 - protein, 9 aa, Homo Sapiens
SYLDRTEQL

SEQ ID NO: 163121 - protein, 9 aa, Homo Sapiens
SYLEKVSEV

SEQ ID NO: 163122 - protein, 9 aa, Homo Sapiens
SYLELVKSL

SEQ ID NO: 163123 - protein, 9 aa, Homo Sapiens
SYLHSLLEM

SEQ ID NO: 163124 - protein, 9 aa, Homo Sapiens
SYLIARIAL

SEQ ID NO: 163125 - protein, 9 aa, Homo Sapiens
SYLLQSTEL

SEQ ID NO: 163126 - protein, 9 aa, Homo Sapiens
SYLPEAGQY

SEQ ID NO: 163127 - protein, 9 aa, Homo Sapiens
SYLPGSTAF

SEQ ID NO: 163128 - protein, 9 aa, Homo Sapiens
SYLPHAPPF

SEQ ID NO: 163129 - protein, 9 aa, Homo Sapiens
SYLPHSSEY

SEQ ID NO: 163130 - protein, 9 aa, Homo Sapiens
SYLPLAHMF

SEQ ID NO: 163131 - protein, 9 aa, Homo Sapiens
SYLTSASSL

SEQ ID NO: 163132 - protein, 9 aa, Homo Sapiens
SYMAYMTQY

SEQ ID NO: 163133 - protein, 9 aa, Homo Sapiens
SYMDPMNEY

SEQ ID NO: 163134 - protein, 9 aa, Homo Sapiens
SYMESVVTF

SEQ ID NO: 163135 - protein, 9 aa, Homo Sapiens
SYMEVPTYL

SEQ ID NO: 163136 - protein, 9 aa, Homo Sapiens
SYMISVNMH

SEQ ID NO: 163137 - protein, 9 aa, Homo Sapiens
SYMKDVCYV

SEQ ID NO: 163138 - protein, 9 aa, Homo Sapiens
SYMPTILWL

SEQ ID NO: 163139 - protein, 9 aa, Homo Sapiens
SYMPTVSHL

SEQ ID NO: 163140 - protein, 9 aa, Homo Sapiens
SYMTTVIEY

SEQ ID NO: 163141 - protein, 9 aa, Homo Sapiens
SYMVKGMAF

SEQ ID NO: 163142 - protein, 9 aa, Homo Sapiens
SYMWTINNF

SEQ ID NO: 163143 - protein, 9 aa, Homo Sapiens
SYNAIRTGL

SEQ ID NO: 163144 - protein, 9 aa, Homo Sapiens
SYNDYVREF

SEQ ID NO: 163145 - protein, 9 aa, Homo Sapiens
SYNLFSREF

SEQ ID NO: 163146 - protein, 9 aa, Homo Sapiens
SYNLTVREL

SEQ ID NO: 163147 - protein, 9 aa, Homo Sapiens
SYPDAILQA

SEQ ID NO: 163148 - protein, 9 aa, Homo Sapiens
SYPDFLHKM

SEQ ID NO: 163149 - protein, 9 aa, Homo Sapiens
SYPDFLRMM

SEQ ID NO: 163150 - protein, 9 aa, Homo Sapiens
SYPDNFLHI

SEQ ID NO: 163151 - protein, 9 aa, Homo Sapiens
SYPFLVLQM

SEQ ID NO: 163152 - protein, 9 aa, Homo Sapiens
SYPHHATQL

SEQ ID NO: 163153 - protein, 9 aa, Homo Sapiens
SYPLFSQEF

SEQ ID NO: 163154 - protein, 9 aa, Homo Sapiens
SYPLNSYEL

SEQ ID NO: 163155 - protein, 9 aa, Homo Sapiens
SYPNPVAHL

SEQ ID NO: 163156 - protein, 9 aa, Homo Sapiens
SYPSVVSTL

SEQ ID NO: 163157 - protein, 9 aa, Homo Sapiens
SYPTTTISY

SEQ ID NO: 163158 - protein, 9 aa, Homo Sapiens
SYQDLVKCF

SEQ ID NO: 163159 - protein, 9 aa, Homo Sapiens
SYQDLVQRL

SEQ ID NO: 163160 - protein, 9 aa, Homo Sapiens
SYQEHVKQL

SEQ ID NO: 163161 - protein, 9 aa, Homo Sapiens
SYQEMIANL

SEQ ID NO: 163162 - protein, 9 aa, Homo Sapiens
SYQESTKQL

SEQ ID NO: 163163 - protein, 9 aa, Homo Sapiens
SYQILTRQL

SEQ ID NO: 163164 - protein, 9 aa, Homo Sapiens
SYQLWADNL

SEQ ID NO: 163165 - protein, 9 aa, Homo Sapiens
SYQNNITHL

SEQ ID NO: 163166 - protein, 9 aa, Homo Sapiens
SYQRAFNEF

SEQ ID NO: 163167 - protein, 9 aa, Homo Sapiens
SYQRFTDCY

SEQ ID NO: 163168 - protein, 9 aa, Homo Sapiens
SYSPYVTEL

SEQ ID NO: 163169 - protein, 9 aa, Homo Sapiens
SYSSIASEF

SEQ ID NO: 163170 - protein, 9 aa, Homo Sapiens
SYVQVTSNF

SEQ ID NO: 163171 - protein, 9 aa, Homo Sapiens
SYVTFPREL

SEQ ID NO: 163172 - protein, 9 aa, Homo Sapiens
SYYAVAHAV

SEQ ID NO: 163173 - protein, 9 aa, Homo Sapiens
SYYAYVVEL

SEQ ID NO: 163174 - protein, 9 aa, Homo Sapiens
SYYEEALEL

SEQ ID NO: 163175 - protein, 9 aa, Homo Sapiens
SYYKDALRF

SEQ ID NO: 163176 - protein, 9 aa, Homo Sapiens
SYYKKALAL

SEQ ID NO: 163177 - protein, 9 aa, Homo Sapiens
SYYKNGWIV

SEQ ID NO: 163178 - protein, 9 aa, Homo Sapiens
SYYNSHDSL

SEQ ID NO: 163179 - protein, 9 aa, Homo Sapiens
SYYQSSVQY

SEQ ID NO: 163180 - protein, 9 aa, Homo Sapiens
SYYSPSIGF

SEQ ID NO: 163181 - protein, 9 aa, Homo Sapiens
SYYTVAHAI

SEQ ID NO: 163182 - protein, 9 aa, Homo Sapiens
SYYWNAQRH

SEQ ID NO: 163183 - protein, 9 aa, Homo Sapiens
TFAEIVTPF

SEQ ID NO: 163184 - protein, 9 aa, Homo Sapiens
TFASRVSSL

SEQ ID NO: 163185 - protein, 9 aa, Homo Sapiens
TFATMVSSL

SEQ ID NO: 163186 - protein, 9 aa, Homo Sapiens
TFFFQPRPL

SEQ ID NO: 163187 - protein, 9 aa, Homo Sapiens
TFFPACVSL

SEQ ID NO: 163188 - protein, 9 aa, Homo Sapiens
TFGERVVAF

SEQ ID NO: 163189 - protein, 9 aa, Homo Sapiens
TFGTMGVGL

SEQ ID NO: 163190 - protein, 9 aa, Homo Sapiens
TFIDDISAY

SEQ ID NO: 163191 - protein, 9 aa, Homo Sapiens
TFIDPRIPL

SEQ ID NO: 163192 - protein, 9 aa, Homo Sapiens
TFIGRANHF

SEQ ID NO: 163193 - protein, 9 aa, Homo Sapiens
TFINNVISH

SEQ ID NO: 163194 - protein, 9 aa, Homo Sapiens
TFIQRVQSL

SEQ ID NO: 163195 - protein, 9 aa, Homo Sapiens
TFIRNSRPL

SEQ ID NO: 163196 - protein, 9 aa, Homo Sapiens
TFLEAGVEM

SEQ ID NO: 163197 - protein, 9 aa, Homo Sapiens
TFLVQLENY

SEQ ID NO: 163198 - protein, 9 aa, Homo Sapiens
TFLYTGNCF

SEQ ID NO: 163199 - protein, 9 aa, Homo Sapiens
TFMDHVLRY

SEQ ID NO: 163200 - protein, 9 aa, Homo Sapiens
TFMDRAGSL

SEQ ID NO: 163201 - protein, 9 aa, Homo Sapiens
TFMEQKITY

SEQ ID NO: 163202 - protein, 9 aa, Homo Sapiens
TFMPKQRSL

SEQ ID NO: 163203 - protein, 9 aa, Homo Sapiens
TFMPVASGL

SEQ ID NO: 163204 - protein, 9 aa, Homo Sapiens
TFNEDVQAL

SEQ ID NO: 163205 - protein, 9 aa, Homo Sapiens
TFNNPTTEF

SEQ ID NO: 163206 - protein, 9 aa, Homo Sapiens
TFPASVLQF

SEQ ID NO: 163207 - protein, 9 aa, Homo Sapiens
TFPKEIQML

SEQ ID NO: 163208 - protein, 9 aa, Homo Sapiens
TFPLQVLGF

SEQ ID NO: 163209 - protein, 9 aa, Homo Sapiens
TFPNNPVEL

SEQ ID NO: 163210 - protein, 9 aa, Homo Sapiens
TFPSDITEF

SEQ ID NO: 163211 - protein, 9 aa, Homo Sapiens
TFQDKTLNF

SEQ ID NO: 163212 - protein, 9 aa, Homo Sapiens
TFQENLSAF

SEQ ID NO: 163213 - protein, 9 aa, Homo Sapiens
TFQNDIHVY

SEQ ID NO: 163214 - protein, 9 aa, Homo Sapiens
TFQSRTLAL

SEQ ID NO: 163215 - protein, 9 aa, Homo Sapiens
TFQSTKAVY

SEQ ID NO: 163216 - protein, 9 aa, Homo Sapiens
TFTFSHATF

SEQ ID NO: 163217 - protein, 9 aa, Homo Sapiens
TFVEPVSAF

SEQ ID NO: 163218 - protein, 9 aa, Homo Sapiens
TLPHEILEM

SEQ ID NO: 163219 - protein, 9 aa, Homo Sapiens
TSPEAFLAL

SEQ ID NO: 163220 - protein, 9 aa, Homo Sapiens
TVGVFIVSI

SEQ ID NO: 163221 - protein, 9 aa, Homo Sapiens
TVYVSMIAL

SEQ ID NO: 163222 - protein, 9 aa, Homo Sapiens
TWPDGWTAV

SEQ ID NO: 163223 - protein, 9 aa, Homo Sapiens
TWPKEVRQL

SEQ ID NO: 163224 - protein, 9 aa, Homo Sapiens
TYASFTRAY

SEQ ID NO: 163225 - protein, 9 aa, Homo Sapiens
TYFAVNANY

SEQ ID NO: 163226 - protein, 9 aa, Homo Sapiens
TYFIVGTAM

SEQ ID NO: 163227 - protein, 9 aa, Homo Sapiens
TYFQRAQSL

SEQ ID NO: 163228 - protein, 9 aa, Homo Sapiens
TYGERVVAF

SEQ ID NO: 163229 - protein, 9 aa, Homo Sapiens
TYGFRGEAL

SEQ ID NO: 163230 - protein, 9 aa, Homo Sapiens
TYIDKSTQL

SEQ ID NO: 163231 - protein, 9 aa, Homo Sapiens
TYIGPSTVF

SEQ ID NO: 163232 - protein, 9 aa, Homo Sapiens
TYIGSVEPL

SEQ ID NO: 163233 - protein, 9 aa, Homo Sapiens
TYIKRVIAH

SEQ ID NO: 163234 - protein, 9 aa, Homo Sapiens
TYINHVVSV

SEQ ID NO: 163235 - protein, 9 aa, Homo Sapiens
TYLDPALEL

SEQ ID NO: 163236 - protein, 9 aa, Homo Sapiens
TYLDVRSCL

SEQ ID NO: 163237 - protein, 9 aa, Homo Sapiens
TYLEKAVEV

SEQ ID NO: 163238 - protein, 9 aa, Homo Sapiens
TYLFTYSSV

SEQ ID NO: 163239 - protein, 9 aa, Homo Sapiens
TYLGVAASL

SEQ ID NO: 163240 - protein, 9 aa, Homo Sapiens
TYLPAGQSV

SEQ ID NO: 163241 - protein, 9 aa, Homo Sapiens
TYLPRIKEY

SEQ ID NO: 163242 - protein, 9 aa, Homo Sapiens
TYLVKRLEY

SEQ ID NO: 163243 - protein, 9 aa, Homo Sapiens
TYMAMYLTY

SEQ ID NO: 163244 - protein, 9 aa, Homo Sapiens
TYNILTHDY

SEQ ID NO: 163245 - protein, 9 aa, Homo Sapiens
TYNTQVNFM

SEQ ID NO: 163246 - protein, 9 aa, Homo Sapiens
TYNYPVHYF

SEQ ID NO: 163247 - protein, 9 aa, Homo Sapiens
TYPAGFMDV

SEQ ID NO: 163248 - protein, 9 aa, Homo Sapiens
TYPDVNNSI

SEQ ID NO: 163249 - protein, 9 aa, Homo Sapiens
TYPENWRAF

SEQ ID NO: 163250 - protein, 9 aa, Homo Sapiens
TYPPFVNFF

SEQ ID NO: 163251 - protein, 9 aa, Homo Sapiens
TYPPYVPEY

SEQ ID NO: 163252 - protein, 9 aa, Homo Sapiens
TYPSLPKSL

SEQ ID NO: 163253 - protein, 9 aa, Homo Sapiens
TYPSNILSH

SEQ ID NO: 163254 - protein, 9 aa, Homo Sapiens
TYQAMVHEL

SEQ ID NO: 163255 - protein, 9 aa, Homo Sapiens
TYQDIQNTI

SEQ ID NO: 163256 - protein, 9 aa, Homo Sapiens
TYQEKITHL

SEQ ID NO: 163257 - protein, 9 aa, Homo Sapiens
TYQFSGVYV

SEQ ID NO: 163258 - protein, 9 aa, Homo Sapiens
TYQKLARAL

SEQ ID NO: 163259 - protein, 9 aa, Homo Sapiens
TYQRSVLAL

SEQ ID NO: 163260 - protein, 9 aa, Homo Sapiens
TYQVLAVTF

SEQ ID NO: 163261 - protein, 9 aa, Homo Sapiens
TYSEFAREL

SEQ ID NO: 163262 - protein, 9 aa, Homo Sapiens
TYSPALNKM

SEQ ID NO: 163263 - protein, 9 aa, Homo Sapiens
TYVSWAIAY

SEQ ID NO: 163264 - protein, 9 aa, Homo Sapiens
TYVTEVREL

SEQ ID NO: 163265 - protein, 9 aa, Homo Sapiens
TYVTPRRPF

SEQ ID NO: 163266 - protein, 9 aa, Homo Sapiens
TYYGSFVTR

SEQ ID NO: 163267 - protein, 9 aa, Homo Sapiens
TYYVSTVLF

SEQ ID NO: 163268 - protein, 9 aa, Homo Sapiens
VALLRVTPF

SEQ ID NO: 163269 - protein, 9 aa, Homo Sapiens
VANTMRTSL

SEQ ID NO: 163270 - protein, 9 aa, Homo Sapiens
VAPEEHPVL

SEQ ID NO: 163271 - protein, 9 aa, Homo Sapiens
VAPLPRSAL

SEQ ID NO: 163272 - protein, 9 aa, Homo Sapiens
VAYVSSVAL

SEQ ID NO: 163273 - protein, 9 aa, Homo Sapiens
VFAAFCRAL

SEQ ID NO: 163274 - protein, 9 aa, Homo Sapiens
VFADYEAYM

SEQ ID NO: 163275 - protein, 9 aa, Homo Sapiens
VFAEKITSL

SEQ ID NO: 163276 - protein, 9 aa, Homo Sapiens
VFAPPAEAY

SEQ ID NO: 163277 - protein, 9 aa, Homo Sapiens
VFAPTPSAM

SEQ ID NO: 163278 - protein, 9 aa, Homo Sapiens
VFCGRILSM

SEQ ID NO: 163279 - protein, 9 aa, Homo Sapiens
VFFTHVQEL

SEQ ID NO: 163280 - protein, 9 aa, Homo Sapiens
VFGGQRLTL

SEQ ID NO: 163281 - protein, 9 aa, Homo Sapiens
VFGTAISAF

SEQ ID NO: 163282 - protein, 9 aa, Homo Sapiens
VFHCQSAVM

SEQ ID NO: 163283 - protein, 9 aa, Homo Sapiens
VFHPKRAVF

SEQ ID NO: 163284 - protein, 9 aa, Homo Sapiens
VFHVSNLEF

SEQ ID NO: 163285 - protein, 9 aa, Homo Sapiens
VFIDEIDAI

SEQ ID NO: 163286 - protein, 9 aa, Homo Sapiens
VFIDGPLAL

SEQ ID NO: 163287 - protein, 9 aa, Homo Sapiens
VFIDKQTNL

SEQ ID NO: 163288 - protein, 9 aa, Homo Sapiens
VFIEDAIQY

SEQ ID NO: 163289 - protein, 9 aa, Homo Sapiens
VFIHQPRAL

SEQ ID NO: 163290 - protein, 9 aa, Homo Sapiens
VFIPHGLIM

SEQ ID NO: 163291 - protein, 9 aa, Homo Sapiens
VFISVCTAL

SEQ ID NO: 163292 - protein, 9 aa, Homo Sapiens
VFIWKISDF

SEQ ID NO: 163293 - protein, 9 aa, Homo Sapiens
VFKERISDM

SEQ ID NO: 163294 - protein, 9 aa, Homo Sapiens
VFLEAAKAL

SEQ ID NO: 163295 - protein, 9 aa, Homo Sapiens
VFLERGEVM

SEQ ID NO: 163296 - protein, 9 aa, Homo Sapiens
VFLLDLGKV

SEQ ID NO: 163297 - protein, 9 aa, Homo Sapiens
VFLPRALAL

SEQ ID NO: 163298 - protein, 9 aa, Homo Sapiens
VFLPRVTEL

SEQ ID NO: 163299 - protein, 9 aa, Homo Sapiens
VFLSTGSEL

SEQ ID NO: 163300 - protein, 9 aa, Homo Sapiens
VFLSTRQVL

SEQ ID NO: 163301 - protein, 9 aa, Homo Sapiens
VFLTTRQTL

SEQ ID NO: 163302 - protein, 9 aa, Homo Sapiens
VFMDKPEEF

SEQ ID NO: 163303 - protein, 9 aa, Homo Sapiens
VFMDVCQNF

SEQ ID NO: 163304 - protein, 9 aa, Homo Sapiens
VFMHVSTAY

SEQ ID NO: 163305 - protein, 9 aa, Homo Sapiens
VFMISSHEL

SEQ ID NO: 163306 - protein, 9 aa, Homo Sapiens
VFMPHVTEA

SEQ ID NO: 163307 - protein, 9 aa, Homo Sapiens
VFMTPGNSF

SEQ ID NO: 163308 - protein, 9 aa, Homo Sapiens
VFNEATSSF

SEQ ID NO: 163309 - protein, 9 aa, Homo Sapiens
VFNFTIHEI

SEQ ID NO: 163310 - protein, 9 aa, Homo Sapiens
VFNPMSQDL

SEQ ID NO: 163311 - protein, 9 aa, Homo Sapiens
VFNSMLVSI

SEQ ID NO: 163312 - protein, 9 aa, Homo Sapiens
VFPAIAQEI

SEQ ID NO: 163313 - protein, 9 aa, Homo Sapiens
VFPDDMPTL

SEQ ID NO: 163314 - protein, 9 aa, Homo Sapiens
VFPDFYLHL

SEQ ID NO: 163315 - protein, 9 aa, Homo Sapiens
VFPDKGYSF

SEQ ID NO: 163316 - protein, 9 aa, Homo Sapiens
VFPEDMAKY

SEQ ID NO: 163317 - protein, 9 aa, Homo Sapiens
VFPEFAAAH

SEQ ID NO: 163318 - protein, 9 aa, Homo Sapiens
VFPEKGYSF

SEQ ID NO: 163319 - protein, 9 aa, Homo Sapiens
VFPETVPSL

SEQ ID NO: 163320 - protein, 9 aa, Homo Sapiens
VFPKPVTAL

SEQ ID NO: 163321 - protein, 9 aa, Homo Sapiens
VFPKVRITA

SEQ ID NO: 163322 - protein, 9 aa, Homo Sapiens
VFPLKVFGY

SEQ ID NO: 163323 - protein, 9 aa, Homo Sapiens
VFPSSAATY

SEQ ID NO: 163324 - protein, 9 aa, Homo Sapiens
VFPTRTARF

SEQ ID NO: 163325 - protein, 9 aa, Homo Sapiens
VFPWHKNLL

SEQ ID NO: 163326 - protein, 9 aa, Homo Sapiens
VFQDMVIVF

SEQ ID NO: 163327 - protein, 9 aa, Homo Sapiens
VFQDRTLHV

SEQ ID NO: 163328 - protein, 9 aa, Homo Sapiens
VFQERINCL

SEQ ID NO: 163329 - protein, 9 aa, Homo Sapiens
VFQEVGINY

SEQ ID NO: 163330 - protein, 9 aa, Homo Sapiens
VFQGAVESI

SEQ ID NO: 163331 - protein, 9 aa, Homo Sapiens
VFQLRDSVY

SEQ ID NO: 163332 - protein, 9 aa, Homo Sapiens
VFQPETSTL

SEQ ID NO: 163333 - protein, 9 aa, Homo Sapiens
VFQPSVKSL

SEQ ID NO: 163334 - protein, 9 aa, Homo Sapiens
VFQPSVRSL

SEQ ID NO: 163335 - protein, 9 aa, Homo Sapiens
VFQQIALSY

SEQ ID NO: 163336 - protein, 9 aa, Homo Sapiens
VFQQVGVSM

SEQ ID NO: 163337 - protein, 9 aa, Homo Sapiens
VFQSTDTCY

SEQ ID NO: 163338 - protein, 9 aa, Homo Sapiens
VFQTKIQEF

SEQ ID NO: 163339 - protein, 9 aa, Homo Sapiens
VFQVKTLSL

SEQ ID NO: 163340 - protein, 9 aa, Homo Sapiens
VFQYRLVEY

SEQ ID NO: 163341 - protein, 9 aa, Homo Sapiens
VFSDGAVSL

SEQ ID NO: 163342 - protein, 9 aa, Homo Sapiens
VFSFKMVSY

SEQ ID NO: 163343 - protein, 9 aa, Homo Sapiens
VFSHRLSVY

SEQ ID NO: 163344 - protein, 9 aa, Homo Sapiens
VFSVRGTSF

SEQ ID NO: 163345 - protein, 9 aa, Homo Sapiens
VFTIQSIVM

SEQ ID NO: 163346 - protein, 9 aa, Homo Sapiens
VFVDRAACF

SEQ ID NO: 163347 - protein, 9 aa, Homo Sapiens
VFVDRAGEW

SEQ ID NO: 163348 - protein, 9 aa, Homo Sapiens
VFVDRTLDL

SEQ ID NO: 163349 - protein, 9 aa, Homo Sapiens
VFVEATHVL

SEQ ID NO: 163350 - protein, 9 aa, Homo Sapiens
VFVEDVDSF

SEQ ID NO: 163351 - protein, 9 aa, Homo Sapiens
VFVVDSAAF

SEQ ID NO: 163352 - protein, 9 aa, Homo Sapiens
VFYELAHQL

SEQ ID NO: 163353 - protein, 9 aa, Homo Sapiens
VFYGFAVHM

SEQ ID NO: 163354 - protein, 9 aa, Homo Sapiens
VFYNPVQEF

SEQ ID NO: 163355 - protein, 9 aa, Homo Sapiens
VFYPSSLAF

SEQ ID NO: 163356 - protein, 9 aa, Homo Sapiens
VFYPYPQYF

SEQ ID NO: 163357 - protein, 9 aa, Homo Sapiens
VFYYFVSAL

SEQ ID NO: 163358 - protein, 9 aa, Homo Sapiens
VGHVMGSAL

SEQ ID NO: 163359 - protein, 9 aa, Homo Sapiens
VGPAAFLYF

SEQ ID NO: 163360 - protein, 9 aa, Homo Sapiens
VLPNIHPEL

SEQ ID NO: 163361 - protein, 9 aa, Homo Sapiens
VLPVYMNCL

SEQ ID NO: 163362 - protein, 9 aa, Homo Sapiens
VMINKATPY

SEQ ID NO: 163363 - protein, 9 aa, Homo Sapiens
VPDTITEWK

SEQ ID NO: 163364 - protein, 9 aa, Homo Sapiens
VTNLFNLDF

SEQ ID NO: 163365 - protein, 9 aa, Homo Sapiens
VVNIQTIAM

SEQ ID NO: 163366 - protein, 9 aa, Homo Sapiens
VWPSSRLEA

SEQ ID NO: 163367 - protein, 9 aa, Homo Sapiens
VYADGSICL

SEQ ID NO: 163368 - protein, 9 aa, Homo Sapiens
VYADQPHIF

SEQ ID NO: 163369 - protein, 9 aa, Homo Sapiens
VYAFSARPL

SEQ ID NO: 163370 - protein, 9 aa, Homo Sapiens
VYALPTIAF

SEQ ID NO: 163371 - protein, 9 aa, Homo Sapiens
VYALQQTAL

SEQ ID NO: 163372 - protein, 9 aa, Homo Sapiens
VYALVVVSY

SEQ ID NO: 163373 - protein, 9 aa, Homo Sapiens
VYCARFVEL

SEQ ID NO: 163374 - protein, 9 aa, Homo Sapiens
VYFASLLTV

SEQ ID NO: 163375 - protein, 9 aa, Homo Sapiens
VYFGIAASL

SEQ ID NO: 163376 - protein, 9 aa, Homo Sapiens
VYFLIGKVY

SEQ ID NO: 163377 - protein, 9 aa, Homo Sapiens
VYFPALTSL

SEQ ID NO: 163378 - protein, 9 aa, Homo Sapiens
VYFPQISSV

SEQ ID NO: 163379 - protein, 9 aa, Homo Sapiens
VYFPWVSQY

SEQ ID NO: 163380 - protein, 9 aa, Homo Sapiens
VYFQMQSTY

SEQ ID NO: 163381 - protein, 9 aa, Homo Sapiens
VYFQMQTTY

SEQ ID NO: 163382 - protein, 9 aa, Homo Sapiens
VYFSAAHAL

SEQ ID NO: 163383 - protein, 9 aa, Homo Sapiens
VYFTQGLGL

SEQ ID NO: 163384 - protein, 9 aa, Homo Sapiens
VYFVQKNSL

SEQ ID NO: 163385 - protein, 9 aa, Homo Sapiens
VYFYTFNSL

SEQ ID NO: 163386 - protein, 9 aa, Homo Sapiens
VYHEILIGY

SEQ ID NO: 163387 - protein, 9 aa, Homo Sapiens
VYHVVGVDV

SEQ ID NO: 163388 - protein, 9 aa, Homo Sapiens
VYIAYSTFY

SEQ ID NO: 163389 - protein, 9 aa, Homo Sapiens
VYIDKVRSL

SEQ ID NO: 163390 - protein, 9 aa, Homo Sapiens
VYIDQTMVL

SEQ ID NO: 163391 - protein, 9 aa, Homo Sapiens
VYIDRVRSL

SEQ ID NO: 163392 - protein, 9 aa, Homo Sapiens
VYIDTESAF

SEQ ID NO: 163393 - protein, 9 aa, Homo Sapiens
VYIEAAIRF

SEQ ID NO: 163394 - protein, 9 aa, Homo Sapiens
VYIEFTEYY

SEQ ID NO: 163395 - protein, 9 aa, Homo Sapiens
VYIEHRLMM

SEQ ID NO: 163396 - protein, 9 aa, Homo Sapiens
VYIGVHVPF

SEQ ID NO: 163397 - protein, 9 aa, Homo Sapiens
VYIIAGACL

SEQ ID NO: 163398 - protein, 9 aa, Homo Sapiens
VYINTAQEF

SEQ ID NO: 163399 - protein, 9 aa, Homo Sapiens
VYIPFSAIY

SEQ ID NO: 163400 - protein, 9 aa, Homo Sapiens
VYIPSKTDL

SEQ ID NO: 163401 - protein, 9 aa, Homo Sapiens
VYIPSRVAL

SEQ ID NO: 163402 - protein, 9 aa, Homo Sapiens
VYISNGQVL

SEQ ID NO: 163403 - protein, 9 aa, Homo Sapiens
VYISSRPPL

SEQ ID NO: 163404 - protein, 9 aa, Homo Sapiens
VYITGKEVF

SEQ ID NO: 163405 - protein, 9 aa, Homo Sapiens
VYITPMEAL

SEQ ID NO: 163406 - protein, 9 aa, Homo Sapiens
VYITRAQLM

SEQ ID NO: 163407 - protein, 9 aa, Homo Sapiens
VYLERLLTY

SEQ ID NO: 163408 - protein, 9 aa, Homo Sapiens
VYLFTEAYY

SEQ ID NO: 163409 - protein, 9 aa, Homo Sapiens
VYLPGVIAA

SEQ ID NO: 163410 - protein, 9 aa, Homo Sapiens
VYLPMSYCY

SEQ ID NO: 163411 - protein, 9 aa, Homo Sapiens
VYLPTHTSL

SEQ ID NO: 163412 - protein, 9 aa, Homo Sapiens
VYLYYKLAY

SEQ ID NO: 163413 - protein, 9 aa, Homo Sapiens
VYMGLLAVF

SEQ ID NO: 163414 - protein, 9 aa, Homo Sapiens
VYMNRVKEI

SEQ ID NO: 163415 - protein, 9 aa, Homo Sapiens
VYMPCLYVY

SEQ ID NO: 163416 - protein, 9 aa, Homo Sapiens
VYNASNNEL

SEQ ID NO: 163417 - protein, 9 aa, Homo Sapiens
VYNEAGVTF

SEQ ID NO: 163418 - protein, 9 aa, Homo Sapiens
VYNFSLVAL

SEQ ID NO: 163419 - protein, 9 aa, Homo Sapiens
VYNITKWSI

SEQ ID NO: 163420 - protein, 9 aa, Homo Sapiens
VYNLVKETM

SEQ ID NO: 163421 - protein, 9 aa, Homo Sapiens
VYNNIMRHY

SEQ ID NO: 163422 - protein, 9 aa, Homo Sapiens
VYNVQYSFI

SEQ ID NO: 163423 - protein, 9 aa, Homo Sapiens
VYNVTQHAV

SEQ ID NO: 163424 - protein, 9 aa, Homo Sapiens
VYNYAEQTL

SEQ ID NO: 163425 - protein, 9 aa, Homo Sapiens
VYPDGIRHI

SEQ ID NO: 163426 - protein, 9 aa, Homo Sapiens
VYPERSTSY

SEQ ID NO: 163427 - protein, 9 aa, Homo Sapiens
VYPEYVIQY

SEQ ID NO: 163428 - protein, 9 aa, Homo Sapiens
VYPGIAVFF

SEQ ID NO: 163429 - protein, 9 aa, Homo Sapiens
VYPGYYLTF

SEQ ID NO: 163430 - protein, 9 aa, Homo Sapiens
VYPLYTIVF

SEQ ID NO: 163431 - protein, 9 aa, Homo Sapiens
VYPMPRVIF

SEQ ID NO: 163432 - protein, 9 aa, Homo Sapiens
VYPNWAIGL

SEQ ID NO: 163433 - protein, 9 aa, Homo Sapiens
VYPPGFMGL

SEQ ID NO: 163434 - protein, 9 aa, Homo Sapiens
VYPPPHQVF

SEQ ID NO: 163435 - protein, 9 aa, Homo Sapiens
VYPQYVIEY

SEQ ID NO: 163436 - protein, 9 aa, Homo Sapiens
VYPSGTVCL

SEQ ID NO: 163437 - protein, 9 aa, Homo Sapiens
VYPTAVHVL

SEQ ID NO: 163438 - protein, 9 aa, Homo Sapiens
VYPYLCRAL

SEQ ID NO: 163439 - protein, 9 aa, Homo Sapiens
VYQAVQALY

SEQ ID NO: 163440 - protein, 9 aa, Homo Sapiens
VYQEIWIGM

SEQ ID NO: 163441 - protein, 9 aa, Homo Sapiens
VYQEMPAQL

SEQ ID NO: 163442 - protein, 9 aa, Homo Sapiens
VYQHGLTGF

SEQ ID NO: 163443 - protein, 9 aa, Homo Sapiens
VYQIAMVHY

SEQ ID NO: 163444 - protein, 9 aa, Homo Sapiens
VYQNHVQHL

SEQ ID NO: 163445 - protein, 9 aa, Homo Sapiens
VYQNIFTAM

SEQ ID NO: 163446 - protein, 9 aa, Homo Sapiens
VYQNQIAEL

SEQ ID NO: 163447 - protein, 9 aa, Homo Sapiens
VYQPKRSVL

SEQ ID NO: 163448 - protein, 9 aa, Homo Sapiens
VYQPMEKLY

SEQ ID NO: 163449 - protein, 9 aa, Homo Sapiens
VYQPVRYYY

SEQ ID NO: 163450 - protein, 9 aa, Homo Sapiens
VYQSMVLFF

SEQ ID NO: 163451 - protein, 9 aa, Homo Sapiens
VYQTYVNAM

SEQ ID NO: 163452 - protein, 9 aa, Homo Sapiens
VYQYMHETI

SEQ ID NO: 163453 - protein, 9 aa, Homo Sapiens
VYQYWNTKA

SEQ ID NO: 163454 - protein, 9 aa, Homo Sapiens
VYSCMRDFL

SEQ ID NO: 163455 - protein, 9 aa, Homo Sapiens
VYSNPVSSL

SEQ ID NO: 163456 - protein, 9 aa, Homo Sapiens
VYSPHVLNL

SEQ ID NO: 163457 - protein, 9 aa, Homo Sapiens
VYTDWIMAL

SEQ ID NO: 163458 - protein, 9 aa, Homo Sapiens
VYTEKVLEA

SEQ ID NO: 163459 - protein, 9 aa, Homo Sapiens
VYTTNIQEL

SEQ ID NO: 163460 - protein, 9 aa, Homo Sapiens
VYTTTVHWL

SEQ ID NO: 163461 - protein, 9 aa, Homo Sapiens
VYTYIQEFY

SEQ ID NO: 163462 - protein, 9 aa, Homo Sapiens
VYVAAVREF

SEQ ID NO: 163463 - protein, 9 aa, Homo Sapiens
VYVERAEVL

SEQ ID NO: 163464 - protein, 9 aa, Homo Sapiens
VYVKHSISF

SEQ ID NO: 163465 - protein, 9 aa, Homo Sapiens
VYVMGGVAM

SEQ ID NO: 163466 - protein, 9 aa, Homo Sapiens
VYVVGTAHF

SEQ ID NO: 163467 - protein, 9 aa, Homo Sapiens
VYWDYMKAI

SEQ ID NO: 163468 - protein, 9 aa, Homo Sapiens
VYWVARKPM

SEQ ID NO: 163469 - protein, 9 aa, Homo Sapiens
VYYASPRSY

SEQ ID NO: 163470 - protein, 9 aa, Homo Sapiens
VYYEVAGHL

SEQ ID NO: 163471 - protein, 9 aa, Homo Sapiens
VYYFSKGTL

SEQ ID NO: 163472 - protein, 9 aa, Homo Sapiens
VYYPELFVW

SEQ ID NO: 163473 - protein, 9 aa, Homo Sapiens
WFHYTLVAF

SEQ ID NO: 163474 - protein, 9 aa, Homo Sapiens
WFIPFVQSL

SEQ ID NO: 163475 - protein, 9 aa, Homo Sapiens
WYMDNPQNL

SEQ ID NO: 163476 - protein, 9 aa, Homo Sapiens
WYQRVYQSL

SEQ ID NO: 163477 - protein, 9 aa, Homo Sapiens
WYYSTKVQL

SEQ ID NO: 163478 - protein, 9 aa, Homo Sapiens
YFADGVLSL

SEQ ID NO: 163479 - protein, 9 aa, Homo Sapiens
YFEDVANAM

SEQ ID NO: 163480 - protein, 9 aa, Homo Sapiens
YFEEIKQFY

SEQ ID NO: 163481 - protein, 9 aa, Homo Sapiens
YFEGGVSSV

SEQ ID NO: 163482 - protein, 9 aa, Homo Sapiens
YFEPKDITA

SEQ ID NO: 163483 - protein, 9 aa, Homo Sapiens
YFFAVDTAY

SEQ ID NO: 163484 - protein, 9 aa, Homo Sapiens
YFHCTLIGY

SEQ ID NO: 163485 - protein, 9 aa, Homo Sapiens
YFHDATRVY

SEQ ID NO: 163486 - protein, 9 aa, Homo Sapiens
YFHDRFLEL

SEQ ID NO: 163487 - protein, 9 aa, Homo Sapiens
YFHDRVASF

SEQ ID NO: 163488 - protein, 9 aa, Homo Sapiens
YFHEALRAF

SEQ ID NO: 163489 - protein, 9 aa, Homo Sapiens
YFHEFGHVM

SEQ ID NO: 163490 - protein, 9 aa, Homo Sapiens
YFHIGSNAL

SEQ ID NO: 163491 - protein, 9 aa, Homo Sapiens
YFHTLTSEY

SEQ ID NO: 163492 - protein, 9 aa, Homo Sapiens
YFHTMVESL

SEQ ID NO: 163493 - protein, 9 aa, Homo Sapiens
YFIIILNHM

SEQ ID NO: 163494 - protein, 9 aa, Homo Sapiens
YFIRDVKSL

SEQ ID NO: 163495 - protein, 9 aa, Homo Sapiens
YFISHILAF

SEQ ID NO: 163496 - protein, 9 aa, Homo Sapiens
YFISHVLAF

SEQ ID NO: 163497 - protein, 9 aa, Homo Sapiens
YFISILQHL

SEQ ID NO: 163498 - protein, 9 aa, Homo Sapiens
YFISYGIEH

SEQ ID NO: 163499 - protein, 9 aa, Homo Sapiens
YFITQDSAF

SEQ ID NO: 163500 - protein, 9 aa, Homo Sapiens
YFIVTRQDY

SEQ ID NO: 163501 - protein, 9 aa, Homo Sapiens
YFKGDTIAL

SEQ ID NO: 163502 - protein, 9 aa, Homo Sapiens
YFKPMMKEF

SEQ ID NO: 163503 - protein, 9 aa, Homo Sapiens
YFLDKIDVI

SEQ ID NO: 163504 - protein, 9 aa, Homo Sapiens
YFLEMQEKL

SEQ ID NO: 163505 - protein, 9 aa, Homo Sapiens
YFLETSRDV

SEQ ID NO: 163506 - protein, 9 aa, Homo Sapiens
YFLEWRSVL

SEQ ID NO: 163507 - protein, 9 aa, Homo Sapiens
YFLHRLLHH

SEQ ID NO: 163508 - protein, 9 aa, Homo Sapiens
YFLPDTAHF

SEQ ID NO: 163509 - protein, 9 aa, Homo Sapiens
YFLPLANTL

SEQ ID NO: 163510 - protein, 9 aa, Homo Sapiens
YFLQQRDTL

SEQ ID NO: 163511 - protein, 9 aa, Homo Sapiens
YFLSRAQSL

SEQ ID NO: 163512 - protein, 9 aa, Homo Sapiens
YFLTKSQSL

SEQ ID NO: 163513 - protein, 9 aa, Homo Sapiens
YFLTTRQTL

SEQ ID NO: 163514 - protein, 9 aa, Homo Sapiens
YFMDHTVAF

SEQ ID NO: 163515 - protein, 9 aa, Homo Sapiens
YFMDVKCPG

SEQ ID NO: 163516 - protein, 9 aa, Homo Sapiens
YFMTMIVSL

SEQ ID NO: 163517 - protein, 9 aa, Homo Sapiens
YFMTYHTVL

SEQ ID NO: 163518 - protein, 9 aa, Homo Sapiens
YFPDARDMV

SEQ ID NO: 163519 - protein, 9 aa, Homo Sapiens
YFPDKVALL

SEQ ID NO: 163520 - protein, 9 aa, Homo Sapiens
YFPDRNVAL

SEQ ID NO: 163521 - protein, 9 aa, Homo Sapiens
YFPELIANF

SEQ ID NO: 163522 - protein, 9 aa, Homo Sapiens
YFPENVKAM

SEQ ID NO: 163523 - protein, 9 aa, Homo Sapiens
YFPEYAEKI

SEQ ID NO: 163524 - protein, 9 aa, Homo Sapiens
YFPGQAIAM

SEQ ID NO: 163525 - protein, 9 aa, Homo Sapiens
YFPHYEVPL

SEQ ID NO: 163526 - protein, 9 aa, Homo Sapiens
YFPKKISEL

SEQ ID NO: 163527 - protein, 9 aa, Homo Sapiens
YFPSWLSQL

SEQ ID NO: 163528 - protein, 9 aa, Homo Sapiens
YFPTQALNF

SEQ ID NO: 163529 - protein, 9 aa, Homo Sapiens
YFPVQVVTH

SEQ ID NO: 163530 - protein, 9 aa, Homo Sapiens
YFQAHKAVL

SEQ ID NO: 163531 - protein, 9 aa, Homo Sapiens
YFQAKIRAL

SEQ ID NO: 163532 - protein, 9 aa, Homo Sapiens
YFQALVNNM

SEQ ID NO: 163533 - protein, 9 aa, Homo Sapiens
YFQDERHPY

SEQ ID NO: 163534 - protein, 9 aa, Homo Sapiens
YFQDGRAVL

SEQ ID NO: 163535 - protein, 9 aa, Homo Sapiens
YFQHREFSF

SEQ ID NO: 163536 - protein, 9 aa, Homo Sapiens
YFQTTSTNL

SEQ ID NO: 163537 - protein, 9 aa, Homo Sapiens
YFQYLSKTY

SEQ ID NO: 163538 - protein, 9 aa, Homo Sapiens
YFQYVGTDF

SEQ ID NO: 163539 - protein, 9 aa, Homo Sapiens
YFRDNPSEL

SEQ ID NO: 163540 - protein, 9 aa, Homo Sapiens
YFRPIDTTM

SEQ ID NO: 163541 - protein, 9 aa, Homo Sapiens
YFRVMVDSL

SEQ ID NO: 163542 - protein, 9 aa, Homo Sapiens
YFSDNILCH

SEQ ID NO: 163543 - protein, 9 aa, Homo Sapiens
YFSEKAYAY

SEQ ID NO: 163544 - protein, 9 aa, Homo Sapiens
YFSPYPQEL

SEQ ID NO: 163545 - protein, 9 aa, Homo Sapiens
YFTDKAASY

SEQ ID NO: 163546 - protein, 9 aa, Homo Sapiens
YFVDDRLVM

SEQ ID NO: 163547 - protein, 9 aa, Homo Sapiens
YFVTGNHEY

SEQ ID NO: 163548 - protein, 9 aa, Homo Sapiens
YFYAAIVAV

SEQ ID NO: 163549 - protein, 9 aa, Homo Sapiens
YFYHGVHKI

SEQ ID NO: 163550 - protein, 9 aa, Homo Sapiens
YFYVIGSSY

SEQ ID NO: 163551 - protein, 9 aa, Homo Sapiens
YIPHGYMEL

SEQ ID NO: 163552 - protein, 9 aa, Homo Sapiens
YLPESRRPL

SEQ ID NO: 163553 - protein, 9 aa, Homo Sapiens
YMLDCRTSL

SEQ ID NO: 163554 - protein, 9 aa, Homo Sapiens
YMNVMLENY

SEQ ID NO: 163555 - protein, 9 aa, Homo Sapiens
YMPAKIGAF

SEQ ID NO: 163556 - protein, 9 aa, Homo Sapiens
YMPQNPHII

SEQ ID NO: 163557 - protein, 9 aa, Homo Sapiens
YNMPYPPVY

SEQ ID NO: 163558 - protein, 9 aa, Homo Sapiens
YSKLVMIPF

SEQ ID NO: 163559 - protein, 9 aa, Homo Sapiens
YVLMPFKLA

SEQ ID NO: 163560 - protein, 9 aa, Homo Sapiens
YVRDLRSIV

SEQ ID NO: 163561 - protein, 9 aa, Homo Sapiens
YVSLDNAVL

SEQ ID NO: 163562 - protein, 9 aa, Homo Sapiens
YWPDVIHSF

SEQ ID NO: 163563 - protein, 9 aa, Homo Sapiens
YYALEVSYF

SEQ ID NO: 163564 - protein, 9 aa, Homo Sapiens
YYALRAAGF

SEQ ID NO: 163565 - protein, 9 aa, Homo Sapiens
YYAVCQNLL

SEQ ID NO: 163566 - protein, 9 aa, Homo Sapiens
YYEDNKQFF

SEQ ID NO: 163567 - protein, 9 aa, Homo Sapiens
YYEEQHPEL

SEQ ID NO: 163568 - protein, 9 aa, Homo Sapiens
YYEFREEAY

SEQ ID NO: 163569 - protein, 9 aa, Homo Sapiens
YYEIRYQFY

SEQ ID NO: 163570 - protein, 9 aa, Homo Sapiens
YYFALAHTV

SEQ ID NO: 163571 - protein, 9 aa, Homo Sapiens
YYFDSYAHF

SEQ ID NO: 163572 - protein, 9 aa, Homo Sapiens
YYFDYKEQL

SEQ ID NO: 163573 - protein, 9 aa, Homo Sapiens
YYFFTPYVY

SEQ ID NO: 163574 - protein, 9 aa, Homo Sapiens
YYFLTNLSF

SEQ ID NO: 163575 - protein, 9 aa, Homo Sapiens
YYFPDSGFF

SEQ ID NO: 163576 - protein, 9 aa, Homo Sapiens
YYFSKLIEF

SEQ ID NO: 163577 - protein, 9 aa, Homo Sapiens
YYFVFDHAL

SEQ ID NO: 163578 - protein, 9 aa, Homo Sapiens
YYFVTREVM

SEQ ID NO: 163579 - protein, 9 aa, Homo Sapiens
YYHARVYEF

SEQ ID NO: 163580 - protein, 9 aa, Homo Sapiens
YYHPARLGA

SEQ ID NO: 163581 - protein, 9 aa, Homo Sapiens
YYHSYWHSM

SEQ ID NO: 163582 - protein, 9 aa, Homo Sapiens
YYHVYKLTL

SEQ ID NO: 163583 - protein, 9 aa, Homo Sapiens
YYHYSYSVV

SEQ ID NO: 163584 - protein, 9 aa, Homo Sapiens
YYIAGSLST

SEQ ID NO: 163585 - protein, 9 aa, Homo Sapiens
YYIDCIRQV

SEQ ID NO: 163586 - protein, 9 aa, Homo Sapiens
YYIDDVFHA

SEQ ID NO: 163587 - protein, 9 aa, Homo Sapiens
YYIEGINQL

SEQ ID NO: 163588 - protein, 9 aa, Homo Sapiens
YYIFRVANH

SEQ ID NO: 163589 - protein, 9 aa, Homo Sapiens
YYINKISST

SEQ ID NO: 163590 - protein, 9 aa, Homo Sapiens
YYIPEITSV

SEQ ID NO: 163591 - protein, 9 aa, Homo Sapiens
YYIRFFITY

SEQ ID NO: 163592 - protein, 9 aa, Homo Sapiens
YYISPRITF

SEQ ID NO: 163593 - protein, 9 aa, Homo Sapiens
YYITTRAQF

SEQ ID NO: 163594 - protein, 9 aa, Homo Sapiens
YYITTRVQF

SEQ ID NO: 163595 - protein, 9 aa, Homo Sapiens
YYIYSKVQL

SEQ ID NO: 163596 - protein, 9 aa, Homo Sapiens
YYKERLLYL

SEQ ID NO: 163597 - protein, 9 aa, Homo Sapiens
YYKPDSPEY

SEQ ID NO: 163598 - protein, 9 aa, Homo Sapiens
YYKPGLLMM

SEQ ID NO: 163599 - protein, 9 aa, Homo Sapiens
YYLARLLGL

SEQ ID NO: 163600 - protein, 9 aa, Homo Sapiens
YYLAWIREH

SEQ ID NO: 163601 - protein, 9 aa, Homo Sapiens
YYLCEQVRL

SEQ ID NO: 163602 - protein, 9 aa, Homo Sapiens
YYLGKILEM

SEQ ID NO: 163603 - protein, 9 aa, Homo Sapiens
YYLHDVLDL

SEQ ID NO: 163604 - protein, 9 aa, Homo Sapiens
YYLKALRSL

SEQ ID NO: 163605 - protein, 9 aa, Homo Sapiens
YYLLTKLES

SEQ ID NO: 163606 - protein, 9 aa, Homo Sapiens
YYLNEIQSF

SEQ ID NO: 163607 - protein, 9 aa, Homo Sapiens
YYLPKDDEY

SEQ ID NO: 163608 - protein, 9 aa, Homo Sapiens
YYLPKLLSY

SEQ ID NO: 163609 - protein, 9 aa, Homo Sapiens
YYLTFVQEL

SEQ ID NO: 163610 - protein, 9 aa, Homo Sapiens
YYLTHGLYL

SEQ ID NO: 163611 - protein, 9 aa, Homo Sapiens
YYLVKREDY

SEQ ID NO: 163612 - protein, 9 aa, Homo Sapiens
YYLWMLHSV

SEQ ID NO: 163613 - protein, 9 aa, Homo Sapiens
YYLYNHVAM

SEQ ID NO: 163614 - protein, 9 aa, Homo Sapiens
YYMDYLAAL

SEQ ID NO: 163615 - protein, 9 aa, Homo Sapiens
YYMRDVTAI

SEQ ID NO: 163616 - protein, 9 aa, Homo Sapiens
YYNGKIHAY

SEQ ID NO: 163617 - protein, 9 aa, Homo Sapiens
YYNKVSTVF

SEQ ID NO: 163618 - protein, 9 aa, Homo Sapiens
YYNLQGISH

SEQ ID NO: 163619 - protein, 9 aa, Homo Sapiens
YYNTEKVSI

SEQ ID NO: 163620 - protein, 9 aa, Homo Sapiens
YYPAKIEAI

SEQ ID NO: 163621 - protein, 9 aa, Homo Sapiens
YYPDHIKGL

SEQ ID NO: 163622 - protein, 9 aa, Homo Sapiens
YYPEHTSVL

SEQ ID NO: 163623 - protein, 9 aa, Homo Sapiens
YYPELAFQF

SEQ ID NO: 163624 - protein, 9 aa, Homo Sapiens
YYPEYKLLF

SEQ ID NO: 163625 - protein, 9 aa, Homo Sapiens
YYPFHYAPF

SEQ ID NO: 163626 - protein, 9 aa, Homo Sapiens
YYPIMVTQL

SEQ ID NO: 163627 - protein, 9 aa, Homo Sapiens
YYPLVAQHY

SEQ ID NO: 163628 - protein, 9 aa, Homo Sapiens
YYPQQAIVF

SEQ ID NO: 163629 - protein, 9 aa, Homo Sapiens
YYPSDVSSL

SEQ ID NO: 163630 - protein, 9 aa, Homo Sapiens
YYPYTITEY

SEQ ID NO: 163631 - protein, 9 aa, Homo Sapiens
YYQDQVDDF

SEQ ID NO: 163632 - protein, 9 aa, Homo Sapiens
YYQDTPKQI

SEQ ID NO: 163633 - protein, 9 aa, Homo Sapiens
YYQETLQQL

SEQ ID NO: 163634 - protein, 9 aa, Homo Sapiens
YYQEYPMSI

SEQ ID NO: 163635 - protein, 9 aa, Homo Sapiens
YYQHIVTTL

SEQ ID NO: 163636 - protein, 9 aa, Homo Sapiens
YYQIRSSQL

SEQ ID NO: 163637 - protein, 9 aa, Homo Sapiens
YYQLGDHEL

SEQ ID NO: 163638 - protein, 9 aa, Homo Sapiens
YYQLMKTAL

SEQ ID NO: 163639 - protein, 9 aa, Homo Sapiens
YYQNHIMNL

SEQ ID NO: 163640 - protein, 9 aa, Homo Sapiens
YYQPLVHLL

SEQ ID NO: 163641 - protein, 9 aa, Homo Sapiens
YYQRMLVVL

SEQ ID NO: 163642 - protein, 9 aa, Homo Sapiens
YYQSGRMLL

SEQ ID NO: 163643 - protein, 9 aa, Homo Sapiens
YYQSGTRSL

SEQ ID NO: 163644 - protein, 9 aa, Homo Sapiens
YYQSSVQYL

SEQ ID NO: 163645 - protein, 9 aa, Homo Sapiens
YYQTPRLWL

SEQ ID NO: 163646 - protein, 9 aa, Homo Sapiens
YYQVLNFAM

SEQ ID NO: 163647 - protein, 9 aa, Homo Sapiens
YYQYMETYM

SEQ ID NO: 163648 - protein, 9 aa, Homo Sapiens
YYRDYPTLV

SEQ ID NO: 163649 - protein, 9 aa, Homo Sapiens
YYSPHGHIL

SEQ ID NO: 163650 - protein, 9 aa, Homo Sapiens
YYSPSCREF

SEQ ID NO: 163651 - protein, 9 aa, Homo Sapiens
YYSPTKNEI

SEQ ID NO: 163652 - protein, 9 aa, Homo Sapiens
YYTDFLITL

SEQ ID NO: 163653 - protein, 9 aa, Homo Sapiens
YYTDFVMEL

SEQ ID NO: 163654 - protein, 9 aa, Homo Sapiens
YYTPDRMVL

SEQ ID NO: 163655 - protein, 9 aa, Homo Sapiens
YYTPITPHL

SEQ ID NO: 163656 - protein, 9 aa, Homo Sapiens
YYTRLGNDF

SEQ ID NO: 163657 - protein, 9 aa, Homo Sapiens
YYTVRQLEL

SEQ ID NO: 163658 - protein, 9 aa, Homo Sapiens
YYVDFFKTL

SEQ ID NO: 163659 - protein, 9 aa, Homo Sapiens
YYVRAVLHL

SEQ ID NO: 163660 - protein, 9 aa, Homo Sapiens
YYVWTVKEV

SEQ ID NO: 163661 - protein, 9 aa, Homo Sapiens
YYYDKNIIH

SEQ ID NO: 163662 - protein, 9 aa, Homo Sapiens
YYYDPTTGL

SEQ ID NO: 163663 - protein, 9 aa, Homo Sapiens
YYYGDISSL

SEQ ID NO: 163664 - protein, 9 aa, Homo Sapiens
YYYNGKAVY

SEQ ID NO: 163665 - protein, 9 aa, Homo Sapiens
YYYNKRILH

SEQ ID NO: 163666 - protein, 9 aa, Homo Sapiens
YYYPKQQGL

SEQ ID NO: 163667 - protein, 10 aa, Homo Sapiens
AAPGYAPPPF

SEQ ID NO: 163668 - protein, 10 aa, Homo Sapiens
AFADYRPTEV

SEQ ID NO: 163669 - protein, 10 aa, Homo Sapiens
AFFEEERSAL

SEQ ID NO: 163670 - protein, 10 aa, Homo Sapiens
AFFGSYRNAL

SEQ ID NO: 163671 - protein, 10 aa, Homo Sapiens
AFFNIPLMAY

SEQ ID NO: 163672 - protein, 10 aa, Homo Sapiens
AFFPGFPLAL

SEQ ID NO: 163673 - protein, 10 aa, Homo Sapiens
AFFTSKALNM

SEQ ID NO: 163674 - protein, 10 aa, Homo Sapiens
AFHPFIAGPY

SEQ ID NO: 163675 - protein, 10 aa, Homo Sapiens
AFIDGGGSVL

SEQ ID NO: 163676 - protein, 10 aa, Homo Sapiens
AFIDRKDSYY

SEQ ID NO: 163677 - protein, 10 aa, Homo Sapiens
AFIRVVGSEF

SEQ ID NO: 163678 - protein, 10 aa, Homo Sapiens
AFITIQVAQM

SEQ ID NO: 163679 - protein, 10 aa, Homo Sapiens
AFLDSQTATF

SEQ ID NO: 163680 - protein, 10 aa, Homo Sapiens
AFMDESTQCF

SEQ ID NO: 163681 - protein, 10 aa, Homo Sapiens
AFPGGPLGAL

SEQ ID NO: 163682 - protein, 10 aa, Homo Sapiens
AFVDKPVSPY

SEQ ID NO: 163683 - protein, 10 aa, Homo Sapiens
AFVTFSTRAM

SEQ ID NO: 163684 - protein, 10 aa, Homo Sapiens
AFVTFTTRAM

SEQ ID NO: 163685 - protein, 10 aa, Homo Sapiens
AFYDVDFLCK

SEQ ID NO: 163686 - protein, 10 aa, Homo Sapiens
AFYDWDNTEL

SEQ ID NO: 163687 - protein, 10 aa, Homo Sapiens
AFYEHAQTYY

SEQ ID NO: 163688 - protein, 10 aa, Homo Sapiens
AFYPEEISSM

SEQ ID NO: 163689 - protein, 10 aa, Homo Sapiens
AFYTFPFQQL

SEQ ID NO: 163690 - protein, 10 aa, Homo Sapiens
AFYVPFAKAL

SEQ ID NO: 163691 - protein, 10 aa, Homo Sapiens
ALPEDDFLSL

SEQ ID NO: 163692 - protein, 10 aa, Homo Sapiens
ALPHGASCPY

SEQ ID NO: 163693 - protein, 10 aa, Homo Sapiens
AWIDAEVTEF

SEQ ID NO: 163694 - protein, 10 aa, Homo Sapiens
AYATFIVTNY

SEQ ID NO: 163695 - protein, 10 aa, Homo Sapiens
AYCTFPASVL

SEQ ID NO: 163696 - protein, 10 aa, Homo Sapiens
AYFAWKATAM

SEQ ID NO: 163697 - protein, 10 aa, Homo Sapiens
AYFDLQTHVI

SEQ ID NO: 163698 - protein, 10 aa, Homo Sapiens
AYFPELIANF

SEQ ID NO: 163699 - protein, 10 aa, Homo Sapiens
AYIAVGSISF

SEQ ID NO: 163700 - protein, 10 aa, Homo Sapiens
AYIDPIAMEY

SEQ ID NO: 163701 - protein, 10 aa, Homo Sapiens
AYISQVPTQM

SEQ ID NO: 163702 - protein, 10 aa, Homo Sapiens
AYLGAKPRSL

SEQ ID NO: 163703 - protein, 10 aa, Homo Sapiens
AYLPKNTHPF

SEQ ID NO: 163704 - protein, 10 aa, Homo Sapiens
AYMDAPKAAL

SEQ ID NO: 163705 - protein, 10 aa, Homo Sapiens
AYMELVNNML

SEQ ID NO: 163706 - protein, 10 aa, Homo Sapiens
AYPDFAPQKF

SEQ ID NO: 163707 - protein, 10 aa, Homo Sapiens
AYRDWFSSQL

SEQ ID NO: 163708 - protein, 10 aa, Homo Sapiens
AYYCHPPTSW

SEQ ID NO: 163709 - protein, 10 aa, Homo Sapiens
AYYDPKTRAM

SEQ ID NO: 163710 - protein, 10 aa, Homo Sapiens
AYYEFKKQFF

SEQ ID NO: 163711 - protein, 10 aa, Homo Sapiens
AYYEFREEAY

SEQ ID NO: 163712 - protein, 10 aa, Homo Sapiens
AYYESEINSL

SEQ ID NO: 163713 - protein, 10 aa, Homo Sapiens
AYYGYPYNAL

SEQ ID NO: 163714 - protein, 10 aa, Homo Sapiens
AYYLGKILEM

SEQ ID NO: 163715 - protein, 10 aa, Homo Sapiens
AYYPSDVSSL

SEQ ID NO: 163716 - protein, 10 aa, Homo Sapiens
EYYDKHFTEF

SEQ ID NO: 163717 - protein, 10 aa, Homo Sapiens
FFFDSAMESY

SEQ ID NO: 163718 - protein, 10 aa, Homo Sapiens
FFFPFDTRQM

SEQ ID NO: 163719 - protein, 10 aa, Homo Sapiens
FFFPTQGHDY

SEQ ID NO: 163720 - protein, 10 aa, Homo Sapiens
FFFTARTSFF

SEQ ID NO: 163721 - protein, 10 aa, Homo Sapiens
FFFTGPLSHF

SEQ ID NO: 163722 - protein, 10 aa, Homo Sapiens
FFHQENVRAL

SEQ ID NO: 163723 - protein, 10 aa, Homo Sapiens
FFILPCTDSF

SEQ ID NO: 163724 - protein, 10 aa, Homo Sapiens
FFLQVKEGIL

SEQ ID NO: 163725 - protein, 10 aa, Homo Sapiens
FFPDGHVMML

SEQ ID NO: 163726 - protein, 10 aa, Homo Sapiens
FFPDKPITQY

SEQ ID NO: 163727 - protein, 10 aa, Homo Sapiens
FFPEAAQVAY

SEQ ID NO: 163728 - protein, 10 aa, Homo Sapiens
FFPEIDLEKY

SEQ ID NO: 163729 - protein, 10 aa, Homo Sapiens
FFPEYTHQLF

SEQ ID NO: 163730 - protein, 10 aa, Homo Sapiens
FFPGISVKSV

SEQ ID NO: 163731 - protein, 10 aa, Homo Sapiens
FFPHVPHPSM

SEQ ID NO: 163732 - protein, 10 aa, Homo Sapiens
FFPQYPDKEL

SEQ ID NO: 163733 - protein, 10 aa, Homo Sapiens
FFPSSCVREL

SEQ ID NO: 163734 - protein, 10 aa, Homo Sapiens
FFPYYVYNII

SEQ ID NO: 163735 - protein, 10 aa, Homo Sapiens
FFQDKELRSM

SEQ ID NO: 163736 - protein, 10 aa, Homo Sapiens
FFQETKTGEL

SEQ ID NO: 163737 - protein, 10 aa, Homo Sapiens
FFQGGIPRAL

SEQ ID NO: 163738 - protein, 10 aa, Homo Sapiens
FFYDGIKAIF

SEQ ID NO: 163739 - protein, 10 aa, Homo Sapiens
FFYDGIKAIL

SEQ ID NO: 163740 - protein, 10 aa, Homo Sapiens
FFYDQAFAIY

SEQ ID NO: 163741 - protein, 10 aa, Homo Sapiens
FFYEGSRVLF

SEQ ID NO: 163742 - protein, 10 aa, Homo Sapiens
FFYHPETQQY

SEQ ID NO: 163743 - protein, 10 aa, Homo Sapiens
FFYNEHTNDF

SEQ ID NO: 163744 - protein, 10 aa, Homo Sapiens
FFYNLIHPEY

SEQ ID NO: 163745 - protein, 10 aa, Homo Sapiens
FHPEAHAITL

SEQ ID NO: 163746 - protein, 10 aa, Homo Sapiens
FLPARFYQAL

SEQ ID NO: 163747 - protein, 10 aa, Homo Sapiens
FLPEEAWCDL

SEQ ID NO: 163748 - protein, 10 aa, Homo Sapiens
FLPEFPSCSL

SEQ ID NO: 163749 - protein, 10 aa, Homo Sapiens
FLPPGSILCM

SEQ ID NO: 163750 - protein, 10 aa, Homo Sapiens
FLPTYPPSAY

SEQ ID NO: 163751 - protein, 10 aa, Homo Sapiens
FSSFIYFASL

SEQ ID NO: 163752 - protein, 10 aa, Homo Sapiens
FYADFGPLNL

SEQ ID NO: 163753 - protein, 10 aa, Homo Sapiens
FYFDLNSEQM

SEQ ID NO: 163754 - protein, 10 aa, Homo Sapiens
FYFDNILNSF

SEQ ID NO: 163755 - protein, 10 aa, Homo Sapiens
FYFDRDDVAL

SEQ ID NO: 163756 - protein, 10 aa, Homo Sapiens
FYFVDDRLVM

SEQ ID NO: 163757 - protein, 10 aa, Homo Sapiens
FYFWPRTVPM

SEQ ID NO: 163758 - protein, 10 aa, Homo Sapiens
FYHLGVRESF

SEQ ID NO: 163759 - protein, 10 aa, Homo Sapiens
FYIIVPPLTL

SEQ ID NO: 163760 - protein, 10 aa, Homo Sapiens
FYIPYRPKDF

SEQ ID NO: 163761 - protein, 10 aa, Homo Sapiens
FYLPIAAAMY

SEQ ID NO: 163762 - protein, 10 aa, Homo Sapiens
FYPECEIRTM

SEQ ID NO: 163763 - protein, 10 aa, Homo Sapiens
FYPEDEILHF

SEQ ID NO: 163764 - protein, 10 aa, Homo Sapiens
FYPEDVAEEL

SEQ ID NO: 163765 - protein, 10 aa, Homo Sapiens
FYPEELDQLL

SEQ ID NO: 163766 - protein, 10 aa, Homo Sapiens
FYPGASPTEF

SEQ ID NO: 163767 - protein, 10 aa, Homo Sapiens
FYPGWKVLVF

SEQ ID NO: 163768 - protein, 10 aa, Homo Sapiens
FYPIYFRPLM

SEQ ID NO: 163769 - protein, 10 aa, Homo Sapiens
FYPKANIVAY

SEQ ID NO: 163770 - protein, 10 aa, Homo Sapiens
FYPPAHQLSL

SEQ ID NO: 163771 - protein, 10 aa, Homo Sapiens
FYQDTFGQQW

SEQ ID NO: 163772 - protein, 10 aa, Homo Sapiens
FYQDTYGQQW

SEQ ID NO: 163773 - protein, 10 aa, Homo Sapiens
FYSGSPTSYF

SEQ ID NO: 163774 - protein, 10 aa, Homo Sapiens
FYTPQNPSSL

SEQ ID NO: 163775 - protein, 10 aa, Homo Sapiens
FYVPEIVDEL

SEQ ID NO: 163776 - protein, 10 aa, Homo Sapiens
FYYDGKVMKL

SEQ ID NO: 163777 - protein, 10 aa, Homo Sapiens
FYYFPDSGFF

SEQ ID NO: 163778 - protein, 10 aa, Homo Sapiens
GFFNGLRTEL

SEQ ID NO: 163779 - protein, 10 aa, Homo Sapiens
GFMTGTISSM

SEQ ID NO: 163780 - protein, 10 aa, Homo Sapiens
GGYDGYRPSF

SEQ ID NO: 163781 - protein, 10 aa, Homo Sapiens
GLFQHICTAY

SEQ ID NO: 163782 - protein, 10 aa, Homo Sapiens
GPPPPPGKPQ

SEQ ID NO: 163783 - protein, 10 aa, Homo Sapiens
GYMSPHPSPL

SEQ ID NO: 163784 - protein, 10 aa, Homo Sapiens
HFFEFLTKEL

SEQ ID NO: 163785 - protein, 10 aa, Homo Sapiens
HFGGGGFLAF

SEQ ID NO: 163786 - protein, 10 aa, Homo Sapiens
HFGGGKTTGF

SEQ ID NO: 163787 - protein, 10 aa, Homo Sapiens
HFPATPLLDY

SEQ ID NO: 163788 - protein, 10 aa, Homo Sapiens
HFPSNLVTEM

SEQ ID NO: 163789 - protein, 10 aa, Homo Sapiens
HFYDFERDAY

SEQ ID NO: 163790 - protein, 10 aa, Homo Sapiens
HYPQFSGQSF

SEQ ID NO: 163791 - protein, 10 aa, Homo Sapiens
HYQDVSCLQF

SEQ ID NO: 163792 - protein, 10 aa, Homo Sapiens
HYYRGNYMTF

SEQ ID NO: 163793 - protein, 10 aa, Homo Sapiens
IFIDRDPAAF

SEQ ID NO: 163794 - protein, 10 aa, Homo Sapiens
IFIDRDPTVF

SEQ ID NO: 163795 - protein, 10 aa, Homo Sapiens
IFLDSKGLEY

SEQ ID NO: 163796 - protein, 10 aa, Homo Sapiens
IFMEKSTRDF

SEQ ID NO: 163797 - protein, 10 aa, Homo Sapiens
IFQELVEGVF

SEQ ID NO: 163798 - protein, 10 aa, Homo Sapiens
IFYEHLTRSL

SEQ ID NO: 163799 - protein, 10 aa, Homo Sapiens
IFYHPETTQL

SEQ ID NO: 163800 - protein, 10 aa, Homo Sapiens
IMPEEEYSEF

SEQ ID NO: 163801 - protein, 10 aa, Homo Sapiens
IWPNARISVM

SEQ ID NO: 163802 - protein, 10 aa, Homo Sapiens
IYFDHDLQSY

SEQ ID NO: 163803 - protein, 10 aa, Homo Sapiens
IYHNPTANSF

SEQ ID NO: 163804 - protein, 10 aa, Homo Sapiens
IYLNWSPEAY

SEQ ID NO: 163805 - protein, 10 aa, Homo Sapiens
IYLPGRPTSM

SEQ ID NO: 163806 - protein, 10 aa, Homo Sapiens
IYMDTLNIFM

SEQ ID NO: 163807 - protein, 10 aa, Homo Sapiens
IYMEPEKQVM

SEQ ID NO: 163808 - protein, 10 aa, Homo Sapiens
IYPGYHQSSY

SEQ ID NO: 163809 - protein, 10 aa, Homo Sapiens
IYPTAPPRSY

SEQ ID NO: 163810 - protein, 10 aa, Homo Sapiens
IYQEGWRTVF

SEQ ID NO: 163811 - protein, 10 aa, Homo Sapiens
IYQEIRNTDM

SEQ ID NO: 163812 - protein, 10 aa, Homo Sapiens
IYQELLGLAF

SEQ ID NO: 163813 - protein, 10 aa, Homo Sapiens
IYTDYRPTPL

SEQ ID NO: 163814 - protein, 10 aa, Homo Sapiens
IYVVQGIYGY

SEQ ID NO: 163815 - protein, 10 aa, Homo Sapiens
IYYTGKYQSL

SEQ ID NO: 163816 - protein, 10 aa, Homo Sapiens
KFISGILAAL

SEQ ID NO: 163817 - protein, 10 aa, Homo Sapiens
KFMTHVASQF

SEQ ID NO: 163818 - protein, 10 aa, Homo Sapiens
KLPEYNPRTL

SEQ ID NO: 163819 - protein, 10 aa, Homo Sapiens
KYFDKRRDYL

SEQ ID NO: 163820 - protein, 10 aa, Homo Sapiens
KYIESPVLFL

SEQ ID NO: 163821 - protein, 10 aa, Homo Sapiens
KYYDEIINAL

SEQ ID NO: 163822 - protein, 10 aa, Homo Sapiens
KYYDKLFKEY

SEQ ID NO: 163823 - protein, 10 aa, Homo Sapiens
KYYDKNAIAI

SEQ ID NO: 163824 - protein, 10 aa, Homo Sapiens
LFPEGPARAF

SEQ ID NO: 163825 - protein, 10 aa, Homo Sapiens
LFPELPKSAL

SEQ ID NO: 163826 - protein, 10 aa, Homo Sapiens
LFPEPEHSSF

SEQ ID NO: 163827 - protein, 10 aa, Homo Sapiens
LFPESERPEM

SEQ ID NO: 163828 - protein, 10 aa, Homo Sapiens
LFPEYKNNKL

SEQ ID NO: 163829 - protein, 10 aa, Homo Sapiens
LFPIHVQTSL

SEQ ID NO: 163830 - protein, 10 aa, Homo Sapiens
LFPPDQFECL

SEQ ID NO: 163831 - protein, 10 aa, Homo Sapiens
LFYTGKQSYY

SEQ ID NO: 163832 - protein, 10 aa, Homo Sapiens
LLPEFPRGPL

SEQ ID NO: 163833 - protein, 10 aa, Homo Sapiens
LLPQHQVPAY

SEQ ID NO: 163834 - protein, 10 aa, Homo Sapiens
LWPDSVPSAL

SEQ ID NO: 163835 - protein, 10 aa, Homo Sapiens
LYINHTPPPL

SEQ ID NO: 163836 - protein, 10 aa, Homo Sapiens
LYPDLLPTDY

SEQ ID NO: 163837 - protein, 10 aa, Homo Sapiens
LYPENIVPSF

SEQ ID NO: 163838 - protein, 10 aa, Homo Sapiens
LYPEVPPEEF

SEQ ID NO: 163839 - protein, 10 aa, Homo Sapiens
LYPHEPTAVF

SEQ ID NO: 163840 - protein, 10 aa, Homo Sapiens
LYYEVEILSH

SEQ ID NO: 163841 - protein, 10 aa, Homo Sapiens
LYYPQQAIVF

SEQ ID NO: 163842 - protein, 10 aa, Homo Sapiens
MFPEHAVKAY

SEQ ID NO: 163843 - protein, 10 aa, Homo Sapiens
MFQTAVGHSF

SEQ ID NO: 163844 - protein, 10 aa, Homo Sapiens
MMPPMGGPPM

SEQ ID NO: 163845 - protein, 10 aa, Homo Sapiens
MWFDKTPLSY

SEQ ID NO: 163846 - protein, 10 aa, Homo Sapiens
MYFDWGPGEM

SEQ ID NO: 163847 - protein, 10 aa, Homo Sapiens
MYKYPSDISY

SEQ ID NO: 163848 - protein, 10 aa, Homo Sapiens
MYMDRRCVYY

SEQ ID NO: 163849 - protein, 10 aa, Homo Sapiens
MYYYNGKAVY

SEQ ID NO: 163850 - protein, 10 aa, Homo Sapiens
NFISLGPSIS

SEQ ID NO: 163851 - protein, 10 aa, Homo Sapiens
NFPEHIFPAL

SEQ ID NO: 163852 - protein, 10 aa, Homo Sapiens
NFPEYELPEL

SEQ ID NO: 163853 - protein, 10 aa, Homo Sapiens
NFYDKKTAIH

SEQ ID NO: 163854 - protein, 10 aa, Homo Sapiens
NFYDRYRGDY

SEQ ID NO: 163855 - protein, 10 aa, Homo Sapiens
NFYEGHITSL

SEQ ID NO: 163856 - protein, 10 aa, Homo Sapiens
NFYGDLRKAL

SEQ ID NO: 163857 - protein, 10 aa, Homo Sapiens
NFYTVAVTSL

SEQ ID NO: 163858 - protein, 10 aa, Homo Sapiens
NGMIGLVTSL

SEQ ID NO: 163859 - protein, 10 aa, Homo Sapiens
NYIDLPVLAI

SEQ ID NO: 163860 - protein, 10 aa, Homo Sapiens
NYIDRFLSSM

SEQ ID NO: 163861 - protein, 10 aa, Homo Sapiens
NYYDLVRTEI

SEQ ID NO: 163862 - protein, 10 aa, Homo Sapiens
NYYNKVSTVF

SEQ ID NO: 163863 - protein, 10 aa, Homo Sapiens
NYYNLQGISH

SEQ ID NO: 163864 - protein, 10 aa, Homo Sapiens
NYYPYTITEY

SEQ ID NO: 163865 - protein, 10 aa, Homo Sapiens
QFPGFPAAAY

SEQ ID NO: 163866 - protein, 10 aa, Homo Sapiens
QFYDNKGITY

SEQ ID NO: 163867 - protein, 10 aa, Homo Sapiens
QFYGLTPLVR

SEQ ID NO: 163868 - protein, 10 aa, Homo Sapiens
QYFDSRGMFI

SEQ ID NO: 163869 - protein, 10 aa, Homo Sapiens
QYLTFKPQTF

SEQ ID NO: 163870 - protein, 10 aa, Homo Sapiens
QYYIFIPSKF

SEQ ID NO: 163871 - protein, 10 aa, Homo Sapiens
QYYNGKIHAY

SEQ ID NO: 163872 - protein, 10 aa, Homo Sapiens
QYYSGELVSY

SEQ ID NO: 163873 - protein, 10 aa, Homo Sapiens
RFFDTNTSVL

SEQ ID NO: 163874 - protein, 10 aa, Homo Sapiens
RFIDDVVSAV

SEQ ID NO: 163875 - protein, 10 aa, Homo Sapiens
RFIDISPAEM

SEQ ID NO: 163876 - protein, 10 aa, Homo Sapiens
RFPDQPFIAL

SEQ ID NO: 163877 - protein, 10 aa, Homo Sapiens
RFPEELTQTF

SEQ ID NO: 163878 - protein, 10 aa, Homo Sapiens
RFPEEPHVPL

SEQ ID NO: 163879 - protein, 10 aa, Homo Sapiens
RFPEHRAAEI

SEQ ID NO: 163880 - protein, 10 aa, Homo Sapiens
RFPNFTNQLL

SEQ ID NO: 163881 - protein, 10 aa, Homo Sapiens
RFQEADSPTL

SEQ ID NO: 163882 - protein, 10 aa, Homo Sapiens
RFQSSAVMAL

SEQ ID NO: 163883 - protein, 10 aa, Homo Sapiens
RFVEVGRVAY

SEQ ID NO: 163884 - protein, 10 aa, Homo Sapiens
RLMVHTVATF

SEQ ID NO: 163885 - protein, 10 aa, Homo Sapiens
RSNFGYNIPL

SEQ ID NO: 163886 - protein, 10 aa, Homo Sapiens
RTPDAFISSF

SEQ ID NO: 163887 - protein, 10 aa, Homo Sapiens
RWPDLHKNEL

SEQ ID NO: 163888 - protein, 10 aa, Homo Sapiens
RYIEKLTNEM

SEQ ID NO: 163889 - protein, 10 aa, Homo Sapiens
RYIMGSGESF

SEQ ID NO: 163890 - protein, 10 aa, Homo Sapiens
RYMELYTHVY

SEQ ID NO: 163891 - protein, 10 aa, Homo Sapiens
RYPDIQASYL

SEQ ID NO: 163892 - protein, 10 aa, Homo Sapiens
RYPDTIALTF

SEQ ID NO: 163893 - protein, 10 aa, Homo Sapiens
RYPEEDYESF

SEQ ID NO: 163894 - protein, 10 aa, Homo Sapiens
RYPGYMNNDL

SEQ ID NO: 163895 - protein, 10 aa, Homo Sapiens
RYYDVPIATL

SEQ ID NO: 163896 - protein, 10 aa, Homo Sapiens
SAPGPGYAPL

SEQ ID NO: 163897 - protein, 10 aa, Homo Sapiens
SAQGSESHSL

SEQ ID NO: 163898 - protein, 10 aa, Homo Sapiens
SFFDNISSEL

SEQ ID NO: 163899 - protein, 10 aa, Homo Sapiens
SFFNLTVKEM

SEQ ID NO: 163900 - protein, 10 aa, Homo Sapiens
SFIAAPVTCF

SEQ ID NO: 163901 - protein, 10 aa, Homo Sapiens
SFMQHDVQEL

SEQ ID NO: 163902 - protein, 10 aa, Homo Sapiens
SFPASSGVSH

SEQ ID NO: 163903 - protein, 10 aa, Homo Sapiens
SFPDCHVGSF

SEQ ID NO: 163904 - protein, 10 aa, Homo Sapiens
SFPDDATSPL

SEQ ID NO: 163905 - protein, 10 aa, Homo Sapiens
SFPEHRVLSF

SEQ ID NO: 163906 - protein, 10 aa, Homo Sapiens
SFPGFHGSEM

SEQ ID NO: 163907 - protein, 10 aa, Homo Sapiens
SFPHYGFPTY

SEQ ID NO: 163908 - protein, 10 aa, Homo Sapiens
SFPKYKPSSL

SEQ ID NO: 163909 - protein, 10 aa, Homo Sapiens
SFQDQKIASM

SEQ ID NO: 163910 - protein, 10 aa, Homo Sapiens
SFVDKTVLPF

SEQ ID NO: 163911 - protein, 10 aa, Homo Sapiens
SFYDGYRHEM

SEQ ID NO: 163912 - protein, 10 aa, Homo Sapiens
SFYDSQGIHF

SEQ ID NO: 163913 - protein, 10 aa, Homo Sapiens
SFYEKGPLTF

SEQ ID NO: 163914 - protein, 10 aa, Homo Sapiens
SFYIPPPATH

SEQ ID NO: 163915 - protein, 10 aa, Homo Sapiens
SFYLFHPLAY

SEQ ID NO: 163916 - protein, 10 aa, Homo Sapiens
SFYNKRTLTF

SEQ ID NO: 163917 - protein, 10 aa, Homo Sapiens
SFYNLLTRTF

SEQ ID NO: 163918 - protein, 10 aa, Homo Sapiens
SFYPEEVSSM

SEQ ID NO: 163919 - protein, 10 aa, Homo Sapiens
SFYTAIAQAF

SEQ ID NO: 163920 - protein, 10 aa, Homo Sapiens
SFYVPSGNYY

SEQ ID NO: 163921 - protein, 10 aa, Homo Sapiens
SMIDPPRAAV

SEQ ID NO: 163922 - protein, 10 aa, Homo Sapiens
SMPTIPALAL

SEQ ID NO: 163923 - protein, 10 aa, Homo Sapiens
SWPTYPQLYV

SEQ ID NO: 163924 - protein, 10 aa, Homo Sapiens
SYADGYSPPL

SEQ ID NO: 163925 - protein, 10 aa, Homo Sapiens
SYCPGMGVAL

SEQ ID NO: 163926 - protein, 10 aa, Homo Sapiens
SYFDAIPVTM

SEQ ID NO: 163927 - protein, 10 aa, Homo Sapiens
SYFDKMSNEM

SEQ ID NO: 163928 - protein, 10 aa, Homo Sapiens
SYFDRYRDSF

SEQ ID NO: 163929 - protein, 10 aa, Homo Sapiens
SYFEGKQVSV

SEQ ID NO: 163930 - protein, 10 aa, Homo Sapiens
SYFEIPTKEF

SEQ ID NO: 163931 - protein, 10 aa, Homo Sapiens
SYFEKETLTF

SEQ ID NO: 163932 - protein, 10 aa, Homo Sapiens
SYFEKGPLTF

SEQ ID NO: 163933 - protein, 10 aa, Homo Sapiens
SYIDRLISVF

SEQ ID NO: 163934 - protein, 10 aa, Homo Sapiens
SYIFPSSISA

SEQ ID NO: 163935 - protein, 10 aa, Homo Sapiens
SYIPYNPQQF

SEQ ID NO: 163936 - protein, 10 aa, Homo Sapiens
SYLFHQHQLY

SEQ ID NO: 163937 - protein, 10 aa, Homo Sapiens
SYMPARVVVF

SEQ ID NO: 163938 - protein, 10 aa, Homo Sapiens
SYMVGMIASF

SEQ ID NO: 163939 - protein, 10 aa, Homo Sapiens
SYPAAVPQAL

SEQ ID NO: 163940 - protein, 10 aa, Homo Sapiens
SYPDWGSNYY

SEQ ID NO: 163941 - protein, 10 aa, Homo Sapiens
SYQIPTENSM

SEQ ID NO: 163942 - protein, 10 aa, Homo Sapiens
SYSFDYPSDM

SEQ ID NO: 163943 - protein, 10 aa, Homo Sapiens
SYVNLPTIAL

SEQ ID NO: 163944 - protein, 10 aa, Homo Sapiens
SYYGNRAATL

SEQ ID NO: 163945 - protein, 10 aa, Homo Sapiens
SYYGRDRSPL

SEQ ID NO: 163946 - protein, 10 aa, Homo Sapiens
SYYTVRQLEL

SEQ ID NO: 163947 - protein, 10 aa, Homo Sapiens
TFPLEAITAF

SEQ ID NO: 163948 - protein, 10 aa, Homo Sapiens
TMPDTPRLFA

SEQ ID NO: 163949 - protein, 10 aa, Homo Sapiens
TMPGLPTRPC

SEQ ID NO: 163950 - protein, 10 aa, Homo Sapiens
TYFFKRTQYF

SEQ ID NO: 163951 - protein, 10 aa, Homo Sapiens
TYFQDERHPY

SEQ ID NO: 163952 - protein, 10 aa, Homo Sapiens
TYIGYLPLAH

SEQ ID NO: 163953 - protein, 10 aa, Homo Sapiens
TYITYFVRAM

SEQ ID NO: 163954 - protein, 10 aa, Homo Sapiens
TYLETKGAAL

SEQ ID NO: 163955 - protein, 10 aa, Homo Sapiens
TYMEYETLTL

SEQ ID NO: 163956 - protein, 10 aa, Homo Sapiens
TYPDWIGQSY

SEQ ID NO: 163957 - protein, 10 aa, Homo Sapiens
TYPEFLANAL

SEQ ID NO: 163958 - protein, 10 aa, Homo Sapiens
TYPYNPPICF

SEQ ID NO: 163959 - protein, 10 aa, Homo Sapiens
TYVGGHVEAL

SEQ ID NO: 163960 - protein, 10 aa, Homo Sapiens
TYYDLVKAFM

SEQ ID NO: 163961 - protein, 10 aa, Homo Sapiens
VFAEGKPLAL

SEQ ID NO: 163962 - protein, 10 aa, Homo Sapiens
VFFEVSPVSF

SEQ ID NO: 163963 - protein, 10 aa, Homo Sapiens
VFFGCTFVAF

SEQ ID NO: 163964 - protein, 10 aa, Homo Sapiens
VFIDTEGSFM

SEQ ID NO: 163965 - protein, 10 aa, Homo Sapiens
VFIGANPLAV

SEQ ID NO: 163966 - protein, 10 aa, Homo Sapiens
VFINVPTVSF

SEQ ID NO: 163967 - protein, 10 aa, Homo Sapiens
VFITDKISSF

SEQ ID NO: 163968 - protein, 10 aa, Homo Sapiens
VFLDYEAGVL

SEQ ID NO: 163969 - protein, 10 aa, Homo Sapiens
VFMFPVGLYY

SEQ ID NO: 163970 - protein, 10 aa, Homo Sapiens
VFMPHVTEAY

SEQ ID NO: 163971 - protein, 10 aa, Homo Sapiens
VFMPQHIMAI

SEQ ID NO: 163972 - protein, 10 aa, Homo Sapiens
VFPEVGASVW

SEQ ID NO: 163973 - protein, 10 aa, Homo Sapiens
VFPMEKLSSF

SEQ ID NO: 163974 - protein, 10 aa, Homo Sapiens
VFPPLTQRTY

SEQ ID NO: 163975 - protein, 10 aa, Homo Sapiens
VFQKPSGVSA

SEQ ID NO: 163976 - protein, 10 aa, Homo Sapiens
VFRTDLITAM

SEQ ID NO: 163977 - protein, 10 aa, Homo Sapiens
VFYPGETVVH

SEQ ID NO: 163978 - protein, 10 aa, Homo Sapiens
VLPHQPLATY

SEQ ID NO: 163979 - protein, 10 aa, Homo Sapiens
VLPSERYKEL

SEQ ID NO: 163980 - protein, 10 aa, Homo Sapiens
VYFAERVTSL

SEQ ID NO: 163981 - protein, 10 aa, Homo Sapiens
VYFHTLTSEY

SEQ ID NO: 163982 - protein, 10 aa, Homo Sapiens
VYHNVKPAAL

SEQ ID NO: 163983 - protein, 10 aa, Homo Sapiens
VYIGYLPLAH

SEQ ID NO: 163984 - protein, 10 aa, Homo Sapiens
VYIVLDKAEY

SEQ ID NO: 163985 - protein, 10 aa, Homo Sapiens
VYKNPSEYHY

SEQ ID NO: 163986 - protein, 10 aa, Homo Sapiens
VYLHYLPSYY

SEQ ID NO: 163987 - protein, 10 aa, Homo Sapiens
VYMEEVPLAL

SEQ ID NO: 163988 - protein, 10 aa, Homo Sapiens
VYMTEPIDEY

SEQ ID NO: 163989 - protein, 10 aa, Homo Sapiens
VYPNFRPTPK

SEQ ID NO: 163990 - protein, 10 aa, Homo Sapiens
VYQFCFSNEF

SEQ ID NO: 163991 - protein, 10 aa, Homo Sapiens
VYYGHTNYIY

SEQ ID NO: 163992 - protein, 10 aa, Homo Sapiens
VYYIFERLCA

SEQ ID NO: 163993 - protein, 10 aa, Homo Sapiens
VYYKDDTHYF

SEQ ID NO: 163994 - protein, 10 aa, Homo Sapiens
VYYTNRALCY

SEQ ID NO: 163995 - protein, 10 aa, Homo Sapiens
VYYVGVASCL

SEQ ID NO: 163996 - protein, 10 aa, Homo Sapiens
WYPLLKNISM

SEQ ID NO: 163997 - protein, 10 aa, Homo Sapiens
YFADRLYDSM

SEQ ID NO: 163998 - protein, 10 aa, Homo Sapiens
YFFDNDSKSF

SEQ ID NO: 163999 - protein, 10 aa, Homo Sapiens
YFFDRSSQAF

SEQ ID NO: 164000 - protein, 10 aa, Homo Sapiens
YFFPDDPPTF

SEQ ID NO: 164001 - protein, 10 aa, Homo Sapiens
YFHDGVRVAA

SEQ ID NO: 164002 - protein, 10 aa, Homo Sapiens
YFHDNVRVAA

SEQ ID NO: 164003 - protein, 10 aa, Homo Sapiens
YFHDRVASFY

SEQ ID NO: 164004 - protein, 10 aa, Homo Sapiens
YFIAPSGHGL

SEQ ID NO: 164005 - protein, 10 aa, Homo Sapiens
YFIAPTGHSL

SEQ ID NO: 164006 - protein, 10 aa, Homo Sapiens
YFIDTDLNQL

SEQ ID NO: 164007 - protein, 10 aa, Homo Sapiens
YFINGDISSL

SEQ ID NO: 164008 - protein, 10 aa, Homo Sapiens
YFIPATGHSL

SEQ ID NO: 164009 - protein, 10 aa, Homo Sapiens
YFIPFLPLEY

SEQ ID NO: 164010 - protein, 10 aa, Homo Sapiens
YFIPTPPSSY

SEQ ID NO: 164011 - protein, 10 aa, Homo Sapiens
YFISHVLAFF

SEQ ID NO: 164012 - protein, 10 aa, Homo Sapiens
YFISPTGHSL

SEQ ID NO: 164013 - protein, 10 aa, Homo Sapiens
YFITPTGHSL

SEQ ID NO: 164014 - protein, 10 aa, Homo Sapiens
YFLPEAPAEL

SEQ ID NO: 164015 - protein, 10 aa, Homo Sapiens
YFLSHIPITL

SEQ ID NO: 164016 - protein, 10 aa, Homo Sapiens
YFNDIAVGAV

SEQ ID NO: 164017 - protein, 10 aa, Homo Sapiens
YFPDCIVRPF

SEQ ID NO: 164018 - protein, 10 aa, Homo Sapiens
YFPDRENQQF

SEQ ID NO: 164019 - protein, 10 aa, Homo Sapiens
YFPDYSIGNL

SEQ ID NO: 164020 - protein, 10 aa, Homo Sapiens
YFPEEKFESL

SEQ ID NO: 164021 - protein, 10 aa, Homo Sapiens
YFPGYFPNEL

SEQ ID NO: 164022 - protein, 10 aa, Homo Sapiens
YFYDDVTTLY

SEQ ID NO: 164023 - protein, 10 aa, Homo Sapiens
YFYDGVSRDA

SEQ ID NO: 164024 - protein, 10 aa, Homo Sapiens
YFYDPDVGNF

SEQ ID NO: 164025 - protein, 10 aa, Homo Sapiens
YFYDRRRIYL

SEQ ID NO: 164026 - protein, 10 aa, Homo Sapiens
YFYDSTRNVY

SEQ ID NO: 164027 - protein, 10 aa, Homo Sapiens
YFYPFPVPPL

SEQ ID NO: 164028 - protein, 10 aa, Homo Sapiens
YFYPYGLQTF

SEQ ID NO: 164029 - protein, 10 aa, Homo Sapiens
YLPENQVLPH

SEQ ID NO: 164030 - protein, 10 aa, Homo Sapiens
YLPNQLFRTF

SEQ ID NO: 164031 - protein, 10 aa, Homo Sapiens
YMIDPSGVSY

SEQ ID NO: 164032 - protein, 10 aa, Homo Sapiens
YWPEAKRAAL

SEQ ID NO: 164033 - protein, 10 aa, Homo Sapiens
YWPEGKRVAM

SEQ ID NO: 164034 - protein, 10 aa, Homo Sapiens
YWPHQPIENL

SEQ ID NO: 164035 - protein, 10 aa, Homo Sapiens
YWPTYTPMEV

SEQ ID NO: 164036 - protein, 10 aa, Homo Sapiens
YWPTYVPMEV

SEQ ID NO: 164037 - protein, 10 aa, Homo Sapiens
YYFDGKGKAF

SEQ ID NO: 164038 - protein, 10 aa, Homo Sapiens
YYFDRDDVAL

SEQ ID NO: 164039 - protein, 10 aa, Homo Sapiens
YYFDVSHEHL

SEQ ID NO: 164040 - protein, 10 aa, Homo Sapiens
YYFEGIKQTF

SEQ ID NO: 164041 - protein, 10 aa, Homo Sapiens
YYFNRKTFSF

SEQ ID NO: 164042 - protein, 10 aa, Homo Sapiens
YYFSTISSSF

SEQ ID NO: 164043 - protein, 10 aa, Homo Sapiens
YYIDDVFHAL

SEQ ID NO: 164044 - protein, 10 aa, Homo Sapiens
YYIDGKIQTN

SEQ ID NO: 164045 - protein, 10 aa, Homo Sapiens
YYIDTLGRIM

SEQ ID NO: 164046 - protein, 10 aa, Homo Sapiens
YYINKISSTL

SEQ ID NO: 164047 - protein, 10 aa, Homo Sapiens
YYINYTTIEL

SEQ ID NO: 164048 - protein, 10 aa, Homo Sapiens
YYIPEITSVL

SEQ ID NO: 164049 - protein, 10 aa, Homo Sapiens
YYIQNGIQSF

SEQ ID NO: 164050 - protein, 10 aa, Homo Sapiens
YYLAQIPIAM

SEQ ID NO: 164051 - protein, 10 aa, Homo Sapiens
YYLDMHSLPH

SEQ ID NO: 164052 - protein, 10 aa, Homo Sapiens
YYLQHPPISF

SEQ ID NO: 164053 - protein, 10 aa, Homo Sapiens
YYLQIHPQEL

SEQ ID NO: 164054 - protein, 10 aa, Homo Sapiens
YYPAQGVQQF

SEQ ID NO: 164055 - protein, 10 aa, Homo Sapiens
YYPDPTFPAM

SEQ ID NO: 164056 - protein, 10 aa, Homo Sapiens
YYPPSQIAQL

SEQ ID NO: 164057 - protein, 10 aa, Homo Sapiens
YYQPYEIPAV

SEQ ID NO: 164058 - protein, 10 aa, Homo Sapiens
YYQTAPKAGY

SEQ ID NO: 164059 - protein, 10 aa, Homo Sapiens
YYRYPTGESY

SEQ ID NO: 164060 - protein, 10 aa, Homo Sapiens
YYVDTAVRHV

SEQ ID NO: 164061 - protein, 10 aa, Homo Sapiens
YYVDTFVSVY

SEQ ID NO: 164062 - protein, 10 aa, Homo Sapiens
YYYDGDIGNY

SEQ ID NO: 164063 - protein, 10 aa, Homo Sapiens
YYYDGDVGNY

SEQ ID NO: 164064 - protein, 10 aa, Homo Sapiens
YYYDPLAGTY

SEQ ID NO: 164065 - protein, 10 aa, Homo Sapiens
YYYDPQTGLY

SEQ ID NO: 164066 - protein, 10 aa, Homo Sapiens
YYYDPTTGLY

SEQ ID NO: 164067 - protein, 10 aa, Homo Sapiens
YYYDTHTNTY

SEQ ID NO: 164068 - protein, 10 aa, Homo Sapiens
YYYHARVYEF

SEQ ID NO: 164069 - protein, 10 aa, Homo Sapiens
YYYNGKAVYA

SEQ ID NO: 164070 - protein, 11 aa, Homo Sapiens
ADREDDPNFFK

SEQ ID NO: 164071 - protein, 11 aa, Homo Sapiens
AFIEYEHERDM

SEQ ID NO: 164072 - protein, 11 aa, Homo Sapiens
AFPGEARISNV

SEQ ID NO: 164073 - protein, 11 aa, Homo Sapiens
AYFQSIKAIAL

SEQ ID NO: 164074 - protein, 11 aa, Homo Sapiens
AYIDPIAMEYY

SEQ ID NO: 164075 - protein, 11 aa, Homo Sapiens
AYMELQQKAEF

SEQ ID NO: 164076 - protein, 11 aa, Homo Sapiens
AYYPAQGVQQF

SEQ ID NO: 164077 - protein, 11 aa, Homo Sapiens
CTFIRVSGSEL

SEQ ID NO: 164078 - protein, 11 aa, Homo Sapiens
EHDYFEFFSND

SEQ ID NO: 164079 - protein, 11 aa, Homo Sapiens
FFHELSPGSCF

SEQ ID NO: 164080 - protein, 11 aa, Homo Sapiens
FFLPGGARSEM

SEQ ID NO: 164081 - protein, 11 aa, Homo Sapiens
FFNEDGVIRPY

SEQ ID NO: 164082 - protein, 11 aa, Homo Sapiens
FYHHEAGVTAL

SEQ ID NO: 164083 - protein, 11 aa, Homo Sapiens
FYIDPYKLLPL

SEQ ID NO: 164084 - protein, 11 aa, Homo Sapiens
FYLNPDQSGEF

SEQ ID NO: 164085 - protein, 11 aa, Homo Sapiens
FYMDTSHLFNT

SEQ ID NO: 164086 - protein, 11 aa, Homo Sapiens
FYNTAQSPSAL

SEQ ID NO: 164087 - protein, 11 aa, Homo Sapiens
FYPDEIQRPPV

SEQ ID NO: 164088 - protein, 11 aa, Homo Sapiens
FYPGSIEVRWF

SEQ ID NO: 164089 - protein, 11 aa, Homo Sapiens
FYPVVKEGRTL

SEQ ID NO: 164090 - protein, 11 aa, Homo Sapiens
FYQDTFGQQWK

SEQ ID NO: 164091 - protein, 11 aa, Homo Sapiens
FYQDTYGQQWK

SEQ ID NO: 164092 - protein, 11 aa, Homo Sapiens
FYVDSDMVNEF

SEQ ID NO: 164093 - protein, 11 aa, Homo Sapiens
FYVPAEPKLAF

SEQ ID NO: 164094 - protein, 11 aa, Homo Sapiens
FYVPGVAPINF

SEQ ID NO: 164095 - protein, 11 aa, Homo Sapiens
FYYDEFGFRVY

SEQ ID NO: 164096 - protein, 11 aa, Homo Sapiens
FYYENENVKGL

SEQ ID NO: 164097 - protein, 11 aa, Homo Sapiens
FYYNTSEQNVM

SEQ ID NO: 164098 - protein, 11 aa, Homo Sapiens
FYYPLEGSKSM

SEQ ID NO: 164099 - protein, 11 aa, Homo Sapiens
GLFQHICTAYE

SEQ ID NO: 164100 - protein, 11 aa, Homo Sapiens
HFIQAGLLSAL

SEQ ID NO: 164101 - protein, 11 aa, Homo Sapiens
HFPDPNKLHCF

SEQ ID NO: 164102 - protein, 11 aa, Homo Sapiens
HFPEFPATRAY

SEQ ID NO: 164103 - protein, 11 aa, Homo Sapiens
HYMNPYQLNAY

SEQ ID NO: 164104 - protein, 11 aa, Homo Sapiens
HYMSPYQLNAY

SEQ ID NO: 164105 - protein, 11 aa, Homo Sapiens
HYPSQPVFAPM

SEQ ID NO: 164106 - protein, 11 aa, Homo Sapiens
IECLPTSGHLS

SEQ ID NO: 164107 - protein, 11 aa, Homo Sapiens
IFFFGTHETAF

SEQ ID NO: 164108 - protein, 11 aa, Homo Sapiens
IFQELVEGVFY

SEQ ID NO: 164109 - protein, 11 aa, Homo Sapiens
IYADPTKRLEL

SEQ ID NO: 164110 - protein, 11 aa, Homo Sapiens
IYALNENVSSF

SEQ ID NO: 164111 - protein, 11 aa, Homo Sapiens
IYIDRHVMQPY

SEQ ID NO: 164112 - protein, 11 aa, Homo Sapiens
IYMDPHYCQSF

SEQ ID NO: 164113 - protein, 11 aa, Homo Sapiens
IYMERAEDLPL

SEQ ID NO: 164114 - protein, 11 aa, Homo Sapiens
IYVALLRVTPF

SEQ ID NO: 164115 - protein, 11 aa, Homo Sapiens
KFMDQHPEMDF

SEQ ID NO: 164116 - protein, 11 aa, Homo Sapiens
KYFEGVSPKSL

SEQ ID NO: 164117 - protein, 11 aa, Homo Sapiens
KYMNSLLIGEL

SEQ ID NO: 164118 - protein, 11 aa, Homo Sapiens
KYMPSVKVSVF

SEQ ID NO: 164119 - protein, 11 aa, Homo Sapiens
KYPKGAGRVAF

SEQ ID NO: 164120 - protein, 11 aa, Homo Sapiens
LFPEADKVRTM

SEQ ID NO: 164121 - protein, 11 aa, Homo Sapiens
LFQENSVLSSL

SEQ ID NO: 164122 - protein, 11 aa, Homo Sapiens
LYFGSAFATPF

SEQ ID NO: 164123 - protein, 11 aa, Homo Sapiens
LYILTGHQSTY

SEQ ID NO: 164124 - protein, 11 aa, Homo Sapiens
LYYDTDPFLFY

SEQ ID NO: 164125 - protein, 11 aa, Homo Sapiens
MAPSETQFSHL

SEQ ID NO: 164126 - protein, 11 aa, Homo Sapiens
NYPDYMPSNIF

SEQ ID NO: 164127 - protein, 11 aa, Homo Sapiens
PRIASNAGSIA

SEQ ID NO: 164128 - protein, 11 aa, Homo Sapiens
QYWDPLLGTCM

SEQ ID NO: 164129 - protein, 11 aa, Homo Sapiens
RFYDPTAGVVM

SEQ ID NO: 164130 - protein, 11 aa, Homo Sapiens
RYHGLSSLCNL

SEQ ID NO: 164131 - protein, 11 aa, Homo Sapiens
RYINPAKLTPY

SEQ ID NO: 164132 - protein, 11 aa, Homo Sapiens
RYMLTAGLTAF

SEQ ID NO: 164133 - protein, 11 aa, Homo Sapiens
RYPEYDGRGVL

SEQ ID NO: 164134 - protein, 11 aa, Homo Sapiens
SFFDATDRVSF

SEQ ID NO: 164135 - protein, 11 aa, Homo Sapiens
SFPTTKTYFPH

SEQ ID NO: 164136 - protein, 11 aa, Homo Sapiens
SFYSGLTPTEF

SEQ ID NO: 164137 - protein, 11 aa, Homo Sapiens
SFYSLTSSNIS

SEQ ID NO: 164138 - protein, 11 aa, Homo Sapiens
SYIFPSSISAM

SEQ ID NO: 164139 - protein, 11 aa, Homo Sapiens
SYQDPAQLSCL

SEQ ID NO: 164140 - protein, 11 aa, Homo Sapiens
SYYGPLNLLTF

SEQ ID NO: 164141 - protein, 11 aa, Homo Sapiens
SYYPAENLIEY

SEQ ID NO: 164142 - protein, 11 aa, Homo Sapiens
SYYPTSSSTSF

SEQ ID NO: 164143 - protein, 11 aa, Homo Sapiens
SYYSPSIGFSY

SEQ ID NO: 164144 - protein, 11 aa, Homo Sapiens
TFPAYPGSSSM

SEQ ID NO: 164145 - protein, 11 aa, Homo Sapiens
TYMPSVSLQSL

SEQ ID NO: 164146 - protein, 11 aa, Homo Sapiens
TYYGSFVTRAL

SEQ ID NO: 164147 - protein, 11 aa, Homo Sapiens
VFMDSNGIRQF

SEQ ID NO: 164148 - protein, 11 aa, Homo Sapiens
VFMPPSSSSEL

SEQ ID NO: 164149 - protein, 11 aa, Homo Sapiens
VFQEPSLLSSL

SEQ ID NO: 164150 - protein, 11 aa, Homo Sapiens
VWPRRPTGEVY

SEQ ID NO: 164151 - protein, 11 aa, Homo Sapiens
VYFENSSSNPY

SEQ ID NO: 164152 - protein, 11 aa, Homo Sapiens
VYFGTSHPRYY

SEQ ID NO: 164153 - protein, 11 aa, Homo Sapiens
VYFKGKWKTPF

SEQ ID NO: 164154 - protein, 11 aa, Homo Sapiens
VYHEPSSIGSM

SEQ ID NO: 164155 - protein, 11 aa, Homo Sapiens
VYNTVSEGTHF

SEQ ID NO: 164156 - protein, 11 aa, Homo Sapiens
VYQETRERLAM

SEQ ID NO: 164157 - protein, 11 aa, Homo Sapiens
VYQSLCPTSWV

SEQ ID NO: 164158 - protein, 11 aa, Homo Sapiens
VYVDLGGSHVF

SEQ ID NO: 164159 - protein, 11 aa, Homo Sapiens
WYFEGLYPTYY

SEQ ID NO: 164160 - protein, 11 aa, Homo Sapiens
YFLERGLESAT

SEQ ID NO: 164161 - protein, 11 aa, Homo Sapiens
YFYDPDVGNFH

SEQ ID NO: 164162 - protein, 11 aa, Homo Sapiens
YFYDVEALRDY

SEQ ID NO: 164163 - protein, 11 aa, Homo Sapiens
YFYPFPVPPLL

SEQ ID NO: 164164 - protein, 11 aa, Homo Sapiens
YLPEAGQYSSF

SEQ ID NO: 164165 - protein, 11 aa, Homo Sapiens
YYALCGFGGVL

SEQ ID NO: 164166 - protein, 11 aa, Homo Sapiens
YYDGDIGNYYY

SEQ ID NO: 164167 - protein, 11 aa, Homo Sapiens
YYDGDVGNYYY

SEQ ID NO: 164168 - protein, 11 aa, Homo Sapiens
YYFAQQNSGHF

SEQ ID NO: 164169 - protein, 11 aa, Homo Sapiens
YYFDAAEAEAW

SEQ ID NO: 164170 - protein, 11 aa, Homo Sapiens
YYFDNVSSTEL

SEQ ID NO: 164171 - protein, 11 aa, Homo Sapiens
YYHGPTPIQSL

SEQ ID NO: 164172 - protein, 11 aa, Homo Sapiens
YYIDADLLREI

SEQ ID NO: 164173 - protein, 11 aa, Homo Sapiens
YYIGDIHPSDL

SEQ ID NO: 164174 - protein, 11 aa, Homo Sapiens
YYIPGQGRSTY

SEQ ID NO: 164175 - protein, 11 aa, Homo Sapiens
YYITNDTVQTY

SEQ ID NO: 164176 - protein, 11 aa, Homo Sapiens
YYLNEQGDRVY

SEQ ID NO: 164177 - protein, 11 aa, Homo Sapiens
YYMEGRDSMQL

SEQ ID NO: 164178 - protein, 11 aa, Homo Sapiens
YYPGFNPFRAY

SEQ ID NO: 164179 - protein, 11 aa, Homo Sapiens
YYQALSSSSIM

SEQ ID NO: 164180 - protein, 11 aa, Homo Sapiens
YYQTIGNHASY

SEQ ID NO: 164181 - protein, 11 aa, Homo Sapiens
YYSPTKNEIVF

SEQ ID NO: 164182 - protein, 11 aa, Homo Sapiens
YYYDPLAGTYY

SEQ ID NO: 164183 - protein, 11 aa, Homo Sapiens
YYYDPQEEVYL

SEQ ID NO: 164184 - protein, 11 aa, Homo Sapiens
YYYDPQTGLYY

SEQ ID NO: 164185 - protein, 11 aa, Homo Sapiens
YYYDPTTGLYY

SEQ ID NO: 164186 - protein, 11 aa, Homo Sapiens
YYYDTHTNTYY

SEQ ID NO: 164187 - protein, 8 aa, Homo Sapiens
AAAPPLTL

SEQ ID NO: 164188 - protein, 8 aa, Homo Sapiens
AAGRPLEL

SEQ ID NO: 164189 - protein, 8 aa, Homo Sapiens
AASHPLLL

SEQ ID NO: 164190 - protein, 8 aa, Homo Sapiens
AGSIVLKV

SEQ ID NO: 164191 - protein, 8 aa, Homo Sapiens
AIGKVLKL

SEQ ID NO: 164192 - protein, 8 aa, Homo Sapiens
ALAPMLEV

SEQ ID NO: 164193 - protein, 8 aa, Homo Sapiens
ALGPILRL

SEQ ID NO: 164194 - protein, 8 aa, Homo Sapiens
AQGVVLKV

SEQ ID NO: 164195 - protein, 8 aa, Homo Sapiens
AQSKILFV

SEQ ID NO: 164196 - protein, 8 aa, Homo Sapiens
ASAPRLMV

SEQ ID NO: 164197 - protein, 8 aa, Homo Sapiens
ASGKLLLL

SEQ ID NO: 164198 - protein, 8 aa, Homo Sapiens
ASGLPLMV

SEQ ID NO: 164199 - protein, 8 aa, Homo Sapiens
ASGMILVM

SEQ ID NO: 164200 - protein, 8 aa, Homo Sapiens
ASGYPVKV

SEQ ID NO: 164201 - protein, 8 aa, Homo Sapiens
ASSTPLHV

SEQ ID NO: 164202 - protein, 8 aa, Homo Sapiens
ASTHRLMT

SEQ ID NO: 164203 - protein, 8 aa, Homo Sapiens
ASYKPVFV

SEQ ID NO: 164204 - protein, 8 aa, Homo Sapiens
ATAPVVAL

SEQ ID NO: 164205 - protein, 8 aa, Homo Sapiens
ATGHPMVI

SEQ ID NO: 164206 - protein, 8 aa, Homo Sapiens
ATGPLLKF

SEQ ID NO: 164207 - protein, 8 aa, Homo Sapiens
ATGPSIKI

SEQ ID NO: 164208 - protein, 8 aa, Homo Sapiens
ATNIDLKL

SEQ ID NO: 164209 - protein, 8 aa, Homo Sapiens
AVAHPLIL

SEQ ID NO: 164210 - protein, 8 aa, Homo Sapiens
AVAPVLSI

SEQ ID NO: 164211 - protein, 8 aa, Homo Sapiens
DTNADKQL

SEQ ID NO: 164212 - protein, 8 aa, Homo Sapiens
FAGKVLRL

SEQ ID NO: 164213 - protein, 8 aa, Homo Sapiens
FAGQPLTI

SEQ ID NO: 164214 - protein, 8 aa, Homo Sapiens
FAGVDIRV

SEQ ID NO: 164215 - protein, 8 aa, Homo Sapiens
FARMLAQE

SEQ ID NO: 164216 - protein, 8 aa, Homo Sapiens
FGITPLFV

SEQ ID NO: 164217 - protein, 8 aa, Homo Sapiens
FNEKSKEL

SEQ ID NO: 164218 - protein, 8 aa, Homo Sapiens
FNTGPLSV

SEQ ID NO: 164219 - protein, 8 aa, Homo Sapiens
FSGNPIKV

SEQ ID NO: 164220 - protein, 8 aa, Homo Sapiens
FSGPAITL

SEQ ID NO: 164221 - protein, 8 aa, Homo Sapiens
FSGRILGL

SEQ ID NO: 164222 - protein, 8 aa, Homo Sapiens
FSSLPLKM

SEQ ID NO: 164223 - protein, 8 aa, Homo Sapiens
FSSPPLSL

SEQ ID NO: 164224 - protein, 8 aa, Homo Sapiens
FTADPLSL

SEQ ID NO: 164225 - protein, 8 aa, Homo Sapiens
FTANALAL

SEQ ID NO: 164226 - protein, 8 aa, Homo Sapiens
FTGAPLKV

SEQ ID NO: 164227 - protein, 8 aa, Homo Sapiens
FTSEPRLI

SEQ ID NO: 164228 - protein, 8 aa, Homo Sapiens
FTSKELVV

SEQ ID NO: 164229 - protein, 8 aa, Homo Sapiens
FVQMMTAK

SEQ ID NO: 164230 - protein, 8 aa, Homo Sapiens
FVRVLVSK

SEQ ID NO: 164231 - protein, 8 aa, Homo Sapiens
GVGPELEV

SEQ ID NO: 164232 - protein, 8 aa, Homo Sapiens
HIAKALAL

SEQ ID NO: 164233 - protein, 8 aa, Homo Sapiens
HNGEPLYI

SEQ ID NO: 164234 - protein, 8 aa, Homo Sapiens
HSGPIHVL

SEQ ID NO: 164235 - protein, 8 aa, Homo Sapiens
HSGPPIVI

SEQ ID NO: 164236 - protein, 8 aa, Homo Sapiens
HTAPVLDI

SEQ ID NO: 164237 - protein, 8 aa, Homo Sapiens
HTGPITCL

SEQ ID NO: 164238 - protein, 8 aa, Homo Sapiens
HTGPVFTV

SEQ ID NO: 164239 - protein, 8 aa, Homo Sapiens
HTGYVIEL

SEQ ID NO: 164240 - protein, 8 aa, Homo Sapiens
HTIKPALV

SEQ ID NO: 164241 - protein, 8 aa, Homo Sapiens
HTSVPLLL

SEQ ID NO: 164242 - protein, 8 aa, Homo Sapiens
IAGKIIEV

SEQ ID NO: 164243 - protein, 8 aa, Homo Sapiens
IAGPVVEI

SEQ ID NO: 164244 - protein, 8 aa, Homo Sapiens
IASKPIIV

SEQ ID NO: 164245 - protein, 8 aa, Homo Sapiens
IGGKSLEV

SEQ ID NO: 164246 - protein, 8 aa, Homo Sapiens
IGSKPLQI

SEQ ID NO: 164247 - protein, 8 aa, Homo Sapiens
IIGRPVVV

SEQ ID NO: 164248 - protein, 8 aa, Homo Sapiens
IINTFHQY

SEQ ID NO: 164249 - protein, 8 aa, Homo Sapiens
ILSKPIEV

SEQ ID NO: 164250 - protein, 8 aa, Homo Sapiens
ISAEPIVV

SEQ ID NO: 164251 - protein, 8 aa, Homo Sapiens
ISAKPLEM

SEQ ID NO: 164252 - protein, 8 aa, Homo Sapiens
ISGKIIFV

SEQ ID NO: 164253 - protein, 8 aa, Homo Sapiens
ISGKPILV

SEQ ID NO: 164254 - protein, 8 aa, Homo Sapiens
ISGPPLKA

SEQ ID NO: 164255 - protein, 8 aa, Homo Sapiens
ISSHVLEL

SEQ ID NO: 164256 - protein, 8 aa, Homo Sapiens
ISVHPLTL

SEQ ID NO: 164257 - protein, 8 aa, Homo Sapiens
ITAPPMHV

SEQ ID NO: 164258 - protein, 8 aa, Homo Sapiens
ITGHVLVV

SEQ ID NO: 164259 - protein, 8 aa, Homo Sapiens
ITSKILFV

SEQ ID NO: 164260 - protein, 8 aa, Homo Sapiens
ITTKVLRV

SEQ ID NO: 164261 - protein, 8 aa, Homo Sapiens
IVGPQLTV

SEQ ID NO: 164262 - protein, 8 aa, Homo Sapiens
IYNEALKG

SEQ ID NO: 164263 - protein, 8 aa, Homo Sapiens
KAGKALVI

SEQ ID NO: 164264 - protein, 8 aa, Homo Sapiens
KAVRPLEL

SEQ ID NO: 164265 - protein, 8 aa, Homo Sapiens
KEKIPIIV

SEQ ID NO: 164266 - protein, 8 aa, Homo Sapiens
KIGTPVKV

SEQ ID NO: 164267 - protein, 8 aa, Homo Sapiens
KIVKPVKV

SEQ ID NO: 164268 - protein, 8 aa, Homo Sapiens
KSITPLML

SEQ ID NO: 164269 - protein, 8 aa, Homo Sapiens
KTNVPVKL

SEQ ID NO: 164270 - protein, 8 aa, Homo Sapiens
KTVKPLSL

SEQ ID NO: 164271 - protein, 8 aa, Homo Sapiens
KWYILLLI

SEQ ID NO: 164272 - protein, 8 aa, Homo Sapiens
LAGPPITV

SEQ ID NO: 164273 - protein, 8 aa, Homo Sapiens
LAGPPLEI

SEQ ID NO: 164274 - protein, 8 aa, Homo Sapiens
LIAPPRYV

SEQ ID NO: 164275 - protein, 8 aa, Homo Sapiens
LPSHPLEL

SEQ ID NO: 164276 - protein, 8 aa, Homo Sapiens
LQGPILRL

SEQ ID NO: 164277 - protein, 8 aa, Homo Sapiens
LSAYPLSV

SEQ ID NO: 164278 - protein, 8 aa, Homo Sapiens
LSGISLHV

SEQ ID NO: 164279 - protein, 8 aa, Homo Sapiens
LSGKILHI

SEQ ID NO: 164280 - protein, 8 aa, Homo Sapiens
LSGPVHGL

SEQ ID NO: 164281 - protein, 8 aa, Homo Sapiens
LSGSPLKV

SEQ ID NO: 164282 - protein, 8 aa, Homo Sapiens
LSGVPLMI

SEQ ID NO: 164283 - protein, 8 aa, Homo Sapiens
LSSKVLAI

SEQ ID NO: 164284 - protein, 8 aa, Homo Sapiens
LTAEVLEL

SEQ ID NO: 164285 - protein, 8 aa, Homo Sapiens
LTGKPVMV

SEQ ID NO: 164286 - protein, 8 aa, Homo Sapiens
LTGPIQVI

SEQ ID NO: 164287 - protein, 8 aa, Homo Sapiens
LTGPVLEL

SEQ ID NO: 164288 - protein, 8 aa, Homo Sapiens
LVNVLPKV

SEQ ID NO: 164289 - protein, 8 aa, Homo Sapiens
MAGPRLEI

SEQ ID NO: 164290 - protein, 8 aa, Homo Sapiens
MSGKPLRM

SEQ ID NO: 164291 - protein, 8 aa, Homo Sapiens
MSGPPLVL

SEQ ID NO: 164292 - protein, 8 aa, Homo Sapiens
MVGPILEM

SEQ ID NO: 164293 - protein, 8 aa, Homo Sapiens
NAASPLIV

SEQ ID NO: 164294 - protein, 8 aa, Homo Sapiens
PLSSPLKV

SEQ ID NO: 164295 - protein, 8 aa, Homo Sapiens
QAGPVIKV

SEQ ID NO: 164296 - protein, 8 aa, Homo Sapiens
QIGPMLRL

SEQ ID NO: 164297 - protein, 8 aa, Homo Sapiens
QQSKILKV

SEQ ID NO: 164298 - protein, 8 aa, Homo Sapiens
QSGFPLRV

SEQ ID NO: 164299 - protein, 8 aa, Homo Sapiens
RAAVPRFV

SEQ ID NO: 164300 - protein, 8 aa, Homo Sapiens
RAGVPMEV

SEQ ID NO: 164301 - protein, 8 aa, Homo Sapiens
RANMPLHV

SEQ ID NO: 164302 - protein, 8 aa, Homo Sapiens
RAVFPIYL

SEQ ID NO: 164303 - protein, 8 aa, Homo Sapiens
RGAPPLQL

SEQ ID NO: 164304 - protein, 8 aa, Homo Sapiens
RGNTPLHL

SEQ ID NO: 164305 - protein, 8 aa, Homo Sapiens
RIAKAIEV

SEQ ID NO: 164306 - protein, 8 aa, Homo Sapiens
RIPKALEV

SEQ ID NO: 164307 - protein, 8 aa, Homo Sapiens
RSQKPVMV

SEQ ID NO: 164308 - protein, 8 aa, Homo Sapiens
RSVFPLSV

SEQ ID NO: 164309 - protein, 8 aa, Homo Sapiens
RTGLRVVV

SEQ ID NO: 164310 - protein, 8 aa, Homo Sapiens
RTIFPLFM

SEQ ID NO: 164311 - protein, 8 aa, Homo Sapiens
RTMQPLAV

SEQ ID NO: 164312 - protein, 8 aa, Homo Sapiens
RTWKPTLV

SEQ ID NO: 164313 - protein, 8 aa, Homo Sapiens
RVVFPLEL

SEQ ID NO: 164314 - protein, 8 aa, Homo Sapiens
SASIPLTV

SEQ ID NO: 164315 - protein, 8 aa, Homo Sapiens
SATFPLSV

SEQ ID NO: 164316 - protein, 8 aa, Homo Sapiens
SFKKPFKL

SEQ ID NO: 164317 - protein, 8 aa, Homo Sapiens
SGGKPLEV

SEQ ID NO: 164318 - protein, 8 aa, Homo Sapiens
SIFVFTHV

SEQ ID NO: 164319 - protein, 8 aa, Homo Sapiens
SIRSVRLV

SEQ ID NO: 164320 - protein, 8 aa, Homo Sapiens
SPVDIDTK

SEQ ID NO: 164321 - protein, 8 aa, Homo Sapiens
SSAPVVLV

SEQ ID NO: 164322 - protein, 8 aa, Homo Sapiens
SSFVFSTV

SEQ ID NO: 164323 - protein, 8 aa, Homo Sapiens
SSGSILKV

SEQ ID NO: 164324 - protein, 8 aa, Homo Sapiens
SSGYPLTI

SEQ ID NO: 164325 - protein, 8 aa, Homo Sapiens
SSSKVLEL

SEQ ID NO: 164326 - protein, 8 aa, Homo Sapiens
SSSRILLV

SEQ ID NO: 164327 - protein, 8 aa, Homo Sapiens
STSPPLKL

SEQ ID NO: 164328 - protein, 8 aa, Homo Sapiens
SVGPWLLA

SEQ ID NO: 164329 - protein, 8 aa, Homo Sapiens
SVGYILWV

SEQ ID NO: 164330 - protein, 8 aa, Homo Sapiens
SVSNPLEV

SEQ ID NO: 164331 - protein, 8 aa, Homo Sapiens
TAGQPLQL

SEQ ID NO: 164332 - protein, 8 aa, Homo Sapiens
TAGRVLEL

SEQ ID NO: 164333 - protein, 8 aa, Homo Sapiens
TNIHELRV

SEQ ID NO: 164334 - protein, 8 aa, Homo Sapiens
TSGPPLTM

SEQ ID NO: 164335 - protein, 8 aa, Homo Sapiens
TTGIPIHV

SEQ ID NO: 164336 - protein, 8 aa, Homo Sapiens
TTGPPHLV

SEQ ID NO: 164337 - protein, 8 aa, Homo Sapiens
TTSIPLRL

SEQ ID NO: 164338 - protein, 8 aa, Homo Sapiens
TTSRVLKV

SEQ ID NO: 164339 - protein, 8 aa, Homo Sapiens
VAGTPMFV

SEQ ID NO: 164340 - protein, 8 aa, Homo Sapiens
VATKPLYV

SEQ ID NO: 164341 - protein, 8 aa, Homo Sapiens
VGSKPLYV

SEQ ID NO: 164342 - protein, 8 aa, Homo Sapiens
VIGIPVYV

SEQ ID NO: 164343 - protein, 8 aa, Homo Sapiens
VIGPPVVL

SEQ ID NO: 164344 - protein, 8 aa, Homo Sapiens
VIGRVLEL

SEQ ID NO: 164345 - protein, 8 aa, Homo Sapiens
VLGRVLQL

SEQ ID NO: 164346 - protein, 8 aa, Homo Sapiens
VLNGPLIL

SEQ ID NO: 164347 - protein, 8 aa, Homo Sapiens
VQGQPLMV

SEQ ID NO: 164348 - protein, 8 aa, Homo Sapiens
VREIAQDF

SEQ ID NO: 164349 - protein, 8 aa, Homo Sapiens
VSGKILYI

SEQ ID NO: 164350 - protein, 8 aa, Homo Sapiens
VSGPAMTL

SEQ ID NO: 164351 - protein, 8 aa, Homo Sapiens
VSGPDIDI

SEQ ID NO: 164352 - protein, 8 aa, Homo Sapiens
VSGPGLSL

SEQ ID NO: 164353 - protein, 8 aa, Homo Sapiens
VSGPPAFL

SEQ ID NO: 164354 - protein, 8 aa, Homo Sapiens
VSGPVHLF

SEQ ID NO: 164355 - protein, 8 aa, Homo Sapiens
VSGQILHV

SEQ ID NO: 164356 - protein, 8 aa, Homo Sapiens
VSGQVLEL

SEQ ID NO: 164357 - protein, 8 aa, Homo Sapiens
VSGVIVKI

SEQ ID NO: 164358 - protein, 8 aa, Homo Sapiens
VSIRPMEL

SEQ ID NO: 164359 - protein, 8 aa, Homo Sapiens
VSSKILEL

SEQ ID NO: 164360 - protein, 8 aa, Homo Sapiens
VSTMILEV

SEQ ID NO: 164361 - protein, 8 aa, Homo Sapiens
VTGHPLLI

SEQ ID NO: 164362 - protein, 8 aa, Homo Sapiens
VTGRWLLL

SEQ ID NO: 164363 - protein, 8 aa, Homo Sapiens
VTHLHRVV

SEQ ID NO: 164364 - protein, 8 aa, Homo Sapiens
VTTVILEV

SEQ ID NO: 164365 - protein, 8 aa, Homo Sapiens
VVGKDLTV

SEQ ID NO: 164366 - protein, 8 aa, Homo Sapiens
VVGPVLDV

SEQ ID NO: 164367 - protein, 8 aa, Homo Sapiens
VVGRWLLV

SEQ ID NO: 164368 - protein, 8 aa, Homo Sapiens
VVGTPLLV

SEQ ID NO: 164369 - protein, 8 aa, Homo Sapiens
VVGYVLTV

SEQ ID NO: 164370 - protein, 8 aa, Homo Sapiens
VVVHPLVL

SEQ ID NO: 164371 - protein, 8 aa, Homo Sapiens
WSGEPLFL

SEQ ID NO: 164372 - protein, 8 aa, Homo Sapiens
WSVDPLDR

SEQ ID NO: 164373 - protein, 8 aa, Homo Sapiens
YAGAILEV

SEQ ID NO: 164374 - protein, 8 aa, Homo Sapiens
YGSKPLNI

SEQ ID NO: 164375 - protein, 8 aa, Homo Sapiens
YGSVPVLL

SEQ ID NO: 164376 - protein, 8 aa, Homo Sapiens
YLGKVLEL

SEQ ID NO: 164377 - protein, 8 aa, Homo Sapiens
YLGRTLLV

SEQ ID NO: 164378 - protein, 8 aa, Homo Sapiens
YLSKVLEL

SEQ ID NO: 164379 - protein, 8 aa, Homo Sapiens
YNSHPLLV

SEQ ID NO: 164380 - protein, 8 aa, Homo Sapiens
YQGPVLLI

SEQ ID NO: 164381 - protein, 8 aa, Homo Sapiens
YQGVNLYI

SEQ ID NO: 164382 - protein, 8 aa, Homo Sapiens
YQGVNLYV

SEQ ID NO: 164383 - protein, 8 aa, Homo Sapiens
YRDDLKKL

SEQ ID NO: 164384 - protein, 8 aa, Homo Sapiens
YSAPVIHV

SEQ ID NO: 164385 - protein, 8 aa, Homo Sapiens
YSGRPVNL

SEQ ID NO: 164386 - protein, 8 aa, Homo Sapiens
YSGVEVRV

SEQ ID NO: 164387 - protein, 8 aa, Homo Sapiens
YSGVPMTI

SEQ ID NO: 164388 - protein, 8 aa, Homo Sapiens
YSIRPLIV

SEQ ID NO: 164389 - protein, 8 aa, Homo Sapiens
YSNFPLQV

SEQ ID NO: 164390 - protein, 8 aa, Homo Sapiens
YSNKEIFL

SEQ ID NO: 164391 - protein, 8 aa, Homo Sapiens
YSNRVVDL

SEQ ID NO: 164392 - protein, 8 aa, Homo Sapiens
YSSKVLLL

SEQ ID NO: 164393 - protein, 8 aa, Homo Sapiens
YSSLPVEV

SEQ ID NO: 164394 - protein, 8 aa, Homo Sapiens
YSSYPIKL

SEQ ID NO: 164395 - protein, 8 aa, Homo Sapiens
YTAEPVTL

SEQ ID NO: 164396 - protein, 8 aa, Homo Sapiens
YTAKELNV

SEQ ID NO: 164397 - protein, 8 aa, Homo Sapiens
YTGFSILV

SEQ ID NO: 164398 - protein, 8 aa, Homo Sapiens
YTGPGLAI

SEQ ID NO: 164399 - protein, 8 aa, Homo Sapiens
YTGYVLAL

SEQ ID NO: 164400 - protein, 8 aa, Homo Sapiens
YTSIPIFL

SEQ ID NO: 164401 - protein, 8 aa, Homo Sapiens
YTVVPRLV

SEQ ID NO: 164402 - protein, 8 aa, Homo Sapiens
YVGYILSV

SEQ ID NO: 164403 - protein, 8 aa, Homo Sapiens
YVSFPLEL

SEQ ID NO: 164404 - protein, 9 aa, Homo Sapiens
AAAAPHLLL

SEQ ID NO: 164405 - protein, 9 aa, Homo Sapiens
AAAIKALEL

SEQ ID NO: 164406 - protein, 9 aa, Homo Sapiens
AAAPHLLLL

SEQ ID NO: 164407 - protein, 9 aa, Homo Sapiens
AAAPQLLIV

SEQ ID NO: 164408 - protein, 9 aa, Homo Sapiens
AAASHPLLL

SEQ ID NO: 164409 - protein, 9 aa, Homo Sapiens
AAEFHARFV

SEQ ID NO: 164410 - protein, 9 aa, Homo Sapiens
AAFEKALEV

SEQ ID NO: 164411 - protein, 9 aa, Homo Sapiens
AAIASLLYL

SEQ ID NO: 164412 - protein, 9 aa, Homo Sapiens
AAIDHQIEV

SEQ ID NO: 164413 - protein, 9 aa, Homo Sapiens
AAIMQALWL

SEQ ID NO: 164414 - protein, 9 aa, Homo Sapiens
AAIPYWLLL

SEQ ID NO: 164415 - protein, 9 aa, Homo Sapiens
AAISEVLYV

SEQ ID NO: 164416 - protein, 9 aa, Homo Sapiens
AAIWFRTYL

SEQ ID NO: 164417 - protein, 9 aa, Homo Sapiens
AALMRPLVV

SEQ ID NO: 164418 - protein, 9 aa, Homo Sapiens
AALPVYQEL

SEQ ID NO: 164419 - protein, 9 aa, Homo Sapiens
AAMSHLLEM

SEQ ID NO: 164420 - protein, 9 aa, Homo Sapiens
AAMSLLRRV

SEQ ID NO: 164421 - protein, 9 aa, Homo Sapiens
AANKTIIYL

SEQ ID NO: 164422 - protein, 9 aa, Homo Sapiens
AANKVVLQL

SEQ ID NO: 164423 - protein, 9 aa, Homo Sapiens
AANRLTLEL

SEQ ID NO: 164424 - protein, 9 aa, Homo Sapiens
AAQVHVLML

SEQ ID NO: 164425 - protein, 9 aa, Homo Sapiens
AASAFFTYV

SEQ ID NO: 164426 - protein, 9 aa, Homo Sapiens
AASAQLLRL

SEQ ID NO: 164427 - protein, 9 aa, Homo Sapiens
AASGLPLMV

SEQ ID NO: 164428 - protein, 9 aa, Homo Sapiens
AASPIITLV

SEQ ID NO: 164429 - protein, 9 aa, Homo Sapiens
AASTAQLLV

SEQ ID NO: 164430 - protein, 9 aa, Homo Sapiens
AATARVLVI

SEQ ID NO: 164431 - protein, 9 aa, Homo Sapiens
AATLYSLKV

SEQ ID NO: 164432 - protein, 9 aa, Homo Sapiens
AATSRIAEL

SEQ ID NO: 164433 - protein, 9 aa, Homo Sapiens
AAVGHVLVV

SEQ ID NO: 164434 - protein, 9 aa, Homo Sapiens
AAVHIILVI

SEQ ID NO: 164435 - protein, 9 aa, Homo Sapiens
AAYQSVRIL

SEQ ID NO: 164436 - protein, 9 aa, Homo Sapiens
AAYRRALEL

SEQ ID NO: 164437 - protein, 9 aa, Homo Sapiens
AAYYHPSYL

SEQ ID NO: 164438 - protein, 9 aa, Homo Sapiens
AGDPVILYV

SEQ ID NO: 164439 - protein, 9 aa, Homo Sapiens
AGMPITLTV

SEQ ID NO: 164440 - protein, 9 aa, Homo Sapiens
AGNGIRVFV

SEQ ID NO: 164441 - protein, 9 aa, Homo Sapiens
AGSIVRLYV

SEQ ID NO: 164442 - protein, 9 aa, Homo Sapiens
AGYNRVKIV

SEQ ID NO: 164443 - protein, 9 aa, Homo Sapiens
AGYPHIRYI

SEQ ID NO: 164444 - protein, 9 aa, Homo Sapiens
AIIALFHLL

SEQ ID NO: 164445 - protein, 9 aa, Homo Sapiens
AIILHLLYL

SEQ ID NO: 164446 - protein, 9 aa, Homo Sapiens
AIMAIFRYV

SEQ ID NO: 164447 - protein, 9 aa, Homo Sapiens
AIMDIVIKV

SEQ ID NO: 164448 - protein, 9 aa, Homo Sapiens
AIMDLLLRL

SEQ ID NO: 164449 - protein, 9 aa, Homo Sapiens
AINIMVLKV

SEQ ID NO: 164450 - protein, 9 aa, Homo Sapiens
AINNAITYL

SEQ ID NO: 164451 - protein, 9 aa, Homo Sapiens
AINPELLQL

SEQ ID NO: 164452 - protein, 9 aa, Homo Sapiens
AINPKLLQL

SEQ ID NO: 164453 - protein, 9 aa, Homo Sapiens
AINPKLMQL

SEQ ID NO: 164454 - protein, 9 aa, Homo Sapiens
AIQDHLLEV

SEQ ID NO: 164455 - protein, 9 aa, Homo Sapiens
AISSVRLYI

SEQ ID NO: 164456 - protein, 9 aa, Homo Sapiens
AITDHYIQV

SEQ ID NO: 164457 - protein, 9 aa, Homo Sapiens
AITSYLLQL

SEQ ID NO: 164458 - protein, 9 aa, Homo Sapiens
AIVKVFLAL

SEQ ID NO: 164459 - protein, 9 aa, Homo Sapiens
AIYYFKIAV

SEQ ID NO: 164460 - protein, 9 aa, Homo Sapiens
ALFQQKLQL

SEQ ID NO: 164461 - protein, 9 aa, Homo Sapiens
ALLPYFVYV

SEQ ID NO: 164462 - protein, 9 aa, Homo Sapiens
ALNAVRLLV

SEQ ID NO: 164463 - protein, 9 aa, Homo Sapiens
ALNEVHLVV

SEQ ID NO: 164464 - protein, 9 aa, Homo Sapiens
ALNILKLVV

SEQ ID NO: 164465 - protein, 9 aa, Homo Sapiens
ALNSKILSV

SEQ ID NO: 164466 - protein, 9 aa, Homo Sapiens
ALNYLQLLV

SEQ ID NO: 164467 - protein, 9 aa, Homo Sapiens
AMNSQILEV

SEQ ID NO: 164468 - protein, 9 aa, Homo Sapiens
AMYVQLIEV

SEQ ID NO: 164469 - protein, 9 aa, Homo Sapiens
ANAASPLIV

SEQ ID NO: 164470 - protein, 9 aa, Homo Sapiens
ANDIARLMV

SEQ ID NO: 164471 - protein, 9 aa, Homo Sapiens
ANGIKVLLI

SEQ ID NO: 164472 - protein, 9 aa, Homo Sapiens
ANLEHAFYV

SEQ ID NO: 164473 - protein, 9 aa, Homo Sapiens
ANLGKFLEL

SEQ ID NO: 164474 - protein, 9 aa, Homo Sapiens
ANLPFPLAL

SEQ ID NO: 164475 - protein, 9 aa, Homo Sapiens
ANLYVGLVV

SEQ ID NO: 164476 - protein, 9 aa, Homo Sapiens
ANQAFFLLV

SEQ ID NO: 164477 - protein, 9 aa, Homo Sapiens
ANQQNILKF

SEQ ID NO: 164478 - protein, 9 aa, Homo Sapiens
ANSDHLMQI

SEQ ID NO: 164479 - protein, 9 aa, Homo Sapiens
ANSGAIVKL

SEQ ID NO: 164480 - protein, 9 aa, Homo Sapiens
ANSPWVVQL

SEQ ID NO: 164481 - protein, 9 aa, Homo Sapiens
ANSPYIPYL

SEQ ID NO: 164482 - protein, 9 aa, Homo Sapiens
ANTALPLAL

SEQ ID NO: 164483 - protein, 9 aa, Homo Sapiens
ANTGIILFI

SEQ ID NO: 164484 - protein, 9 aa, Homo Sapiens
ANTLVYHVV

SEQ ID NO: 164485 - protein, 9 aa, Homo Sapiens
ANTQVVREV

SEQ ID NO: 164486 - protein, 9 aa, Homo Sapiens
ANVEHILKI

SEQ ID NO: 164487 - protein, 9 aa, Homo Sapiens
ANWYFGNFL

SEQ ID NO: 164488 - protein, 9 aa, Homo Sapiens
AQMDYQLRL

SEQ ID NO: 164489 - protein, 9 aa, Homo Sapiens
AQNGIPLRI

SEQ ID NO: 164490 - protein, 9 aa, Homo Sapiens
AQNPSELYL

SEQ ID NO: 164491 - protein, 9 aa, Homo Sapiens
AQNRFLLEL

SEQ ID NO: 164492 - protein, 9 aa, Homo Sapiens
AQYEHDLEV

SEQ ID NO: 164493 - protein, 9 aa, Homo Sapiens
AQYNFILVV

SEQ ID NO: 164494 - protein, 9 aa, Homo Sapiens
ASAAAALVL

SEQ ID NO: 164495 - protein, 9 aa, Homo Sapiens
ASAASALHL

SEQ ID NO: 164496 - protein, 9 aa, Homo Sapiens
ASAPRLMVL

SEQ ID NO: 164497 - protein, 9 aa, Homo Sapiens
ASDPRIIRL

SEQ ID NO: 164498 - protein, 9 aa, Homo Sapiens
ASDPYQVHV

SEQ ID NO: 164499 - protein, 9 aa, Homo Sapiens
ASEFGNHYL

SEQ ID NO: 164500 - protein, 9 aa, Homo Sapiens
ASFDGTIKV

SEQ ID NO: 164501 - protein, 9 aa, Homo Sapiens
ASFDKSIKL

SEQ ID NO: 164502 - protein, 9 aa, Homo Sapiens
ASFDRAIEM

SEQ ID NO: 164503 - protein, 9 aa, Homo Sapiens
ASFGSFHLI

SEQ ID NO: 164504 - protein, 9 aa, Homo Sapiens
ASFHRVQAL

SEQ ID NO: 164505 - protein, 9 aa, Homo Sapiens
ASFKAFRSL

SEQ ID NO: 164506 - protein, 9 aa, Homo Sapiens
ASFPEYLVV

SEQ ID NO: 164507 - protein, 9 aa, Homo Sapiens
ASFPGANII

SEQ ID NO: 164508 - protein, 9 aa, Homo Sapiens
ASFPHLRIL

SEQ ID NO: 164509 - protein, 9 aa, Homo Sapiens
ASFQEIMEV

SEQ ID NO: 164510 - protein, 9 aa, Homo Sapiens
ASFSDVRIL

SEQ ID NO: 164511 - protein, 9 aa, Homo Sapiens
ASFTRAYLL

SEQ ID NO: 164512 - protein, 9 aa, Homo Sapiens
ASFWGGMLV

SEQ ID NO: 164513 - protein, 9 aa, Homo Sapiens
ASFYQRALL

SEQ ID NO: 164514 - protein, 9 aa, Homo Sapiens
ASGPGLSFL

SEQ ID NO: 164515 - protein, 9 aa, Homo Sapiens
ASGPPVSEL

SEQ ID NO: 164516 - protein, 9 aa, Homo Sapiens
ASHFFNLMF

SEQ ID NO: 164517 - protein, 9 aa, Homo Sapiens
ASHGFYEFL

SEQ ID NO: 164518 - protein, 9 aa, Homo Sapiens
ASHLHLNSV

SEQ ID NO: 164519 - protein, 9 aa, Homo Sapiens
ASIFHQQEL

SEQ ID NO: 164520 - protein, 9 aa, Homo Sapiens
ASIGNAQKL

SEQ ID NO: 164521 - protein, 9 aa, Homo Sapiens
ASILKQLAV

SEQ ID NO: 164522 - protein, 9 aa, Homo Sapiens
ASIQQTLKL

SEQ ID NO: 164523 - protein, 9 aa, Homo Sapiens
ASIRIPRTV

SEQ ID NO: 164524 - protein, 9 aa, Homo Sapiens
ASISHFMQF

SEQ ID NO: 164525 - protein, 9 aa, Homo Sapiens
ASISHVAHV

SEQ ID NO: 164526 - protein, 9 aa, Homo Sapiens
ASISLAQYL

SEQ ID NO: 164527 - protein, 9 aa, Homo Sapiens
ASISRSLEL

SEQ ID NO: 164528 - protein, 9 aa, Homo Sapiens
ASITLQQQL

SEQ ID NO: 164529 - protein, 9 aa, Homo Sapiens
ASITSFLTV

SEQ ID NO: 164530 - protein, 9 aa, Homo Sapiens
ASIVRVKKL

SEQ ID NO: 164531 - protein, 9 aa, Homo Sapiens
ASIYKILHL

SEQ ID NO: 164532 - protein, 9 aa, Homo Sapiens
ASKAWTLEV

SEQ ID NO: 164533 - protein, 9 aa, Homo Sapiens
ASLDLVLHL

SEQ ID NO: 164534 - protein, 9 aa, Homo Sapiens
ASLDRTIKV

SEQ ID NO: 164535 - protein, 9 aa, Homo Sapiens
ASLDWPRMV

SEQ ID NO: 164536 - protein, 9 aa, Homo Sapiens
ASLEKVQKL

SEQ ID NO: 164537 - protein, 9 aa, Homo Sapiens
ASLERAQNL

SEQ ID NO: 164538 - protein, 9 aa, Homo Sapiens
ASLFSGRLV

SEQ ID NO: 164539 - protein, 9 aa, Homo Sapiens
ASLGLQLEV

SEQ ID NO: 164540 - protein, 9 aa, Homo Sapiens
ASLGYVVVV

SEQ ID NO: 164541 - protein, 9 aa, Homo Sapiens
ASLHVMMTL

SEQ ID NO: 164542 - protein, 9 aa, Homo Sapiens
ASLISVRNL

SEQ ID NO: 164543 - protein, 9 aa, Homo Sapiens
ASLLFKTLL

SEQ ID NO: 164544 - protein, 9 aa, Homo Sapiens
ASLMHSFIL

SEQ ID NO: 164545 - protein, 9 aa, Homo Sapiens
ASLPKPFFL

SEQ ID NO: 164546 - protein, 9 aa, Homo Sapiens
ASLPLVLYI

SEQ ID NO: 164547 - protein, 9 aa, Homo Sapiens
ASLPRVLRV

SEQ ID NO: 164548 - protein, 9 aa, Homo Sapiens
ASLPTSVQV

SEQ ID NO: 164549 - protein, 9 aa, Homo Sapiens
ASLPYAQQL

SEQ ID NO: 164550 - protein, 9 aa, Homo Sapiens
ASLSEVLEL

SEQ ID NO: 164551 - protein, 9 aa, Homo Sapiens
ASLSHQSLV

SEQ ID NO: 164552 - protein, 9 aa, Homo Sapiens
ASLSLPLVL

SEQ ID NO: 164553 - protein, 9 aa, Homo Sapiens
ASLTKILVI

SEQ ID NO: 164554 - protein, 9 aa, Homo Sapiens
ASLVFPLLV

SEQ ID NO: 164555 - protein, 9 aa, Homo Sapiens
ASLVIAQLL

SEQ ID NO: 164556 - protein, 9 aa, Homo Sapiens
ASLWQELEV

SEQ ID NO: 164557 - protein, 9 aa, Homo Sapiens
ASLYLLRVL

SEQ ID NO: 164558 - protein, 9 aa, Homo Sapiens
ASMIHPKEV

SEQ ID NO: 164559 - protein, 9 aa, Homo Sapiens
ASMSVVLKL

SEQ ID NO: 164560 - protein, 9 aa, Homo Sapiens
ASMVLPRAV

SEQ ID NO: 164561 - protein, 9 aa, Homo Sapiens
ASNGSLLKV

SEQ ID NO: 164562 - protein, 9 aa, Homo Sapiens
ASNGVLLLM

SEQ ID NO: 164563 - protein, 9 aa, Homo Sapiens
ASNIMEVKI

SEQ ID NO: 164564 - protein, 9 aa, Homo Sapiens
ASNIMIVTL

SEQ ID NO: 164565 - protein, 9 aa, Homo Sapiens
ASNIVSLKV

SEQ ID NO: 164566 - protein, 9 aa, Homo Sapiens
ASNKSPLVL

SEQ ID NO: 164567 - protein, 9 aa, Homo Sapiens
ASNLIEVFV

SEQ ID NO: 164568 - protein, 9 aa, Homo Sapiens
ASNPAMLLY

SEQ ID NO: 164569 - protein, 9 aa, Homo Sapiens
ASNPELLNL

SEQ ID NO: 164570 - protein, 9 aa, Homo Sapiens
ASNPKILSL

SEQ ID NO: 164571 - protein, 9 aa, Homo Sapiens
ASNPRGLFV

SEQ ID NO: 164572 - protein, 9 aa, Homo Sapiens
ASNPRVTRF

SEQ ID NO: 164573 - protein, 9 aa, Homo Sapiens
ASNVMQLLL

SEQ ID NO: 164574 - protein, 9 aa, Homo Sapiens
ASNYFRAMF

SEQ ID NO: 164575 - protein, 9 aa, Homo Sapiens
ASQLYLLFL

SEQ ID NO: 164576 - protein, 9 aa, Homo Sapiens
ASQQKILSL

SEQ ID NO: 164577 - protein, 9 aa, Homo Sapiens
ASQSVQLEL

SEQ ID NO: 164578 - protein, 9 aa, Homo Sapiens
ASQYFMLLL

SEQ ID NO: 164579 - protein, 9 aa, Homo Sapiens
ASRTRITFV

SEQ ID NO: 164580 - protein, 9 aa, Homo Sapiens
ASSAAPLFF

SEQ ID NO: 164581 - protein, 9 aa, Homo Sapiens
ASSDKRLYM

SEQ ID NO: 164582 - protein, 9 aa, Homo Sapiens
ASSELERLI

SEQ ID NO: 164583 - protein, 9 aa, Homo Sapiens
ASSFVFLNL

SEQ ID NO: 164584 - protein, 9 aa, Homo Sapiens
ASSGDFLDL

SEQ ID NO: 164585 - protein, 9 aa, Homo Sapiens
ASSGDILQL

SEQ ID NO: 164586 - protein, 9 aa, Homo Sapiens
ASSGLLLMI

SEQ ID NO: 164587 - protein, 9 aa, Homo Sapiens
ASSPEHPEL

SEQ ID NO: 164588 - protein, 9 aa, Homo Sapiens
ASSPGILVL

SEQ ID NO: 164589 - protein, 9 aa, Homo Sapiens
ASSPHGLVM

SEQ ID NO: 164590 - protein, 9 aa, Homo Sapiens
ASSPIPVVI

SEQ ID NO: 164591 - protein, 9 aa, Homo Sapiens
ASSPISHFL

SEQ ID NO: 164592 - protein, 9 aa, Homo Sapiens
ASSPKFSEL

SEQ ID NO: 164593 - protein, 9 aa, Homo Sapiens
ASSPLRLWL

SEQ ID NO: 164594 - protein, 9 aa, Homo Sapiens
ASSPPHLQF

SEQ ID NO: 164595 - protein, 9 aa, Homo Sapiens
ASSRMFLLV

SEQ ID NO: 164596 - protein, 9 aa, Homo Sapiens
ASSSLPKKL

SEQ ID NO: 164597 - protein, 9 aa, Homo Sapiens
ASSSQIIHI

SEQ ID NO: 164598 - protein, 9 aa, Homo Sapiens
ASSSYDLTV

SEQ ID NO: 164599 - protein, 9 aa, Homo Sapiens
ASSSYNMVI

SEQ ID NO: 164600 - protein, 9 aa, Homo Sapiens
ASTAFNLQV

SEQ ID NO: 164601 - protein, 9 aa, Homo Sapiens
ASTALVWVV

SEQ ID NO: 164602 - protein, 9 aa, Homo Sapiens
ASTARHLYL

SEQ ID NO: 164603 - protein, 9 aa, Homo Sapiens
ASTDGHLRV

SEQ ID NO: 164604 - protein, 9 aa, Homo Sapiens
ASTEVKLRL

SEQ ID NO: 164605 - protein, 9 aa, Homo Sapiens
ASTFRLLTV

SEQ ID NO: 164606 - protein, 9 aa, Homo Sapiens
ASTILHLVV

SEQ ID NO: 164607 - protein, 9 aa, Homo Sapiens
ASTPAILFL

SEQ ID NO: 164608 - protein, 9 aa, Homo Sapiens
ASTSRLLSV

SEQ ID NO: 164609 - protein, 9 aa, Homo Sapiens
ASTSRSLAL

SEQ ID NO: 164610 - protein, 9 aa, Homo Sapiens
ASTTQHLRL

SEQ ID NO: 164611 - protein, 9 aa, Homo Sapiens
ASTVRILEV

SEQ ID NO: 164612 - protein, 9 aa, Homo Sapiens
ASTWVFPTL

SEQ ID NO: 164613 - protein, 9 aa, Homo Sapiens
ASVDKVLEL

SEQ ID NO: 164614 - protein, 9 aa, Homo Sapiens
ASVDKVTRL

SEQ ID NO: 164615 - protein, 9 aa, Homo Sapiens
ASVGRLLEL

SEQ ID NO: 164616 - protein, 9 aa, Homo Sapiens
ASVPKELYL

SEQ ID NO: 164617 - protein, 9 aa, Homo Sapiens
ASVVTVLRV

SEQ ID NO: 164618 - protein, 9 aa, Homo Sapiens
ASWDHTIRV

SEQ ID NO: 164619 - protein, 9 aa, Homo Sapiens
ASWPHIQLV

SEQ ID NO: 164620 - protein, 9 aa, Homo Sapiens
ASYEFVQRL

SEQ ID NO: 164621 - protein, 9 aa, Homo Sapiens
ASYEKKVRL

SEQ ID NO: 164622 - protein, 9 aa, Homo Sapiens
ASYFEPLIL

SEQ ID NO: 164623 - protein, 9 aa, Homo Sapiens
ASYKKAIIL

SEQ ID NO: 164624 - protein, 9 aa, Homo Sapiens
ASYPAPQEV

SEQ ID NO: 164625 - protein, 9 aa, Homo Sapiens
ASYPIPIIL

SEQ ID NO: 164626 - protein, 9 aa, Homo Sapiens
ASYSGLMRI

SEQ ID NO: 164627 - protein, 9 aa, Homo Sapiens
ASYTKALKL

SEQ ID NO: 164628 - protein, 9 aa, Homo Sapiens
ASYVNLPTI

SEQ ID NO: 164629 - protein, 9 aa, Homo Sapiens
ATAKNVLKL

SEQ ID NO: 164630 - protein, 9 aa, Homo Sapiens
ATAPPHVTV

SEQ ID NO: 164631 - protein, 9 aa, Homo Sapiens
ATASNLVKV

SEQ ID NO: 164632 - protein, 9 aa, Homo Sapiens
ATASVNLKV

SEQ ID NO: 164633 - protein, 9 aa, Homo Sapiens
ATAVVQLYL

SEQ ID NO: 164634 - protein, 9 aa, Homo Sapiens
ATDNIILTV

SEQ ID NO: 164635 - protein, 9 aa, Homo Sapiens
ATEPHVRMV

SEQ ID NO: 164636 - protein, 9 aa, Homo Sapiens
ATFDEVLEL

SEQ ID NO: 164637 - protein, 9 aa, Homo Sapiens
ATFLQISTV

SEQ ID NO: 164638 - protein, 9 aa, Homo Sapiens
ATFPKEIQM

SEQ ID NO: 164639 - protein, 9 aa, Homo Sapiens
ATHGAALTV

SEQ ID NO: 164640 - protein, 9 aa, Homo Sapiens
ATHGRFLEI

SEQ ID NO: 164641 - protein, 9 aa, Homo Sapiens
ATIARELLM

SEQ ID NO: 164642 - protein, 9 aa, Homo Sapiens
ATIDGVRFL

SEQ ID NO: 164643 - protein, 9 aa, Homo Sapiens
ATIDKVVKI

SEQ ID NO: 164644 - protein, 9 aa, Homo Sapiens
ATIKLQSTV

SEQ ID NO: 164645 - protein, 9 aa, Homo Sapiens
ATILKLLEV

SEQ ID NO: 164646 - protein, 9 aa, Homo Sapiens
ATILRELEV

SEQ ID NO: 164647 - protein, 9 aa, Homo Sapiens
ATIRKALRL

SEQ ID NO: 164648 - protein, 9 aa, Homo Sapiens
ATISSPLEL

SEQ ID NO: 164649 - protein, 9 aa, Homo Sapiens
ATISYILTL

SEQ ID NO: 164650 - protein, 9 aa, Homo Sapiens
ATKIVFLTV

SEQ ID NO: 164651 - protein, 9 aa, Homo Sapiens
ATLEKVIEI

SEQ ID NO: 164652 - protein, 9 aa, Homo Sapiens
ATLGATLKL

SEQ ID NO: 164653 - protein, 9 aa, Homo Sapiens
ATLHLLLTL

SEQ ID NO: 164654 - protein, 9 aa, Homo Sapiens
ATLKLQSEL

SEQ ID NO: 164655 - protein, 9 aa, Homo Sapiens
ATLNSFIHV

SEQ ID NO: 164656 - protein, 9 aa, Homo Sapiens
ATLQLSLKL

SEQ ID NO: 164657 - protein, 9 aa, Homo Sapiens
ATLTRPLAL

SEQ ID NO: 164658 - protein, 9 aa, Homo Sapiens
ATMGHWILL

SEQ ID NO: 164659 - protein, 9 aa, Homo Sapiens
ATMKDFTSL

SEQ ID NO: 164660 - protein, 9 aa, Homo Sapiens
ATMKRMLSL

SEQ ID NO: 164661 - protein, 9 aa, Homo Sapiens
ATMPVTMLI

SEQ ID NO: 164662 - protein, 9 aa, Homo Sapiens
ATMPVVPSV

SEQ ID NO: 164663 - protein, 9 aa, Homo Sapiens
ATNAAVTVL

SEQ ID NO: 164664 - protein, 9 aa, Homo Sapiens
ATNHKVLLF

SEQ ID NO: 164665 - protein, 9 aa, Homo Sapiens
ATNHRVLLF

SEQ ID NO: 164666 - protein, 9 aa, Homo Sapiens
ATNLLKLFL

SEQ ID NO: 164667 - protein, 9 aa, Homo Sapiens
ATNNLMKLV

SEQ ID NO: 164668 - protein, 9 aa, Homo Sapiens
ATNPEHLEI

SEQ ID NO: 164669 - protein, 9 aa, Homo Sapiens
ATNPISRVL

SEQ ID NO: 164670 - protein, 9 aa, Homo Sapiens
ATNPKPVKL

SEQ ID NO: 164671 - protein, 9 aa, Homo Sapiens
ATNVVRLLL

SEQ ID NO: 164672 - protein, 9 aa, Homo Sapiens
ATQTQFFHV

SEQ ID NO: 164673 - protein, 9 aa, Homo Sapiens
ATSGDYLRV

SEQ ID NO: 164674 - protein, 9 aa, Homo Sapiens
ATSPTVLYV

SEQ ID NO: 164675 - protein, 9 aa, Homo Sapiens
ATTDLLTKL

SEQ ID NO: 164676 - protein, 9 aa, Homo Sapiens
ATTVRPVFL

SEQ ID NO: 164677 - protein, 9 aa, Homo Sapiens
ATVKIIQML

SEQ ID NO: 164678 - protein, 9 aa, Homo Sapiens
ATVKRVNIL

SEQ ID NO: 164679 - protein, 9 aa, Homo Sapiens
ATVPFLLQL

SEQ ID NO: 164680 - protein, 9 aa, Homo Sapiens
ATVPGLLKV

SEQ ID NO: 164681 - protein, 9 aa, Homo Sapiens
ATVPIRLII

SEQ ID NO: 164682 - protein, 9 aa, Homo Sapiens
ATVPKVTVI

SEQ ID NO: 164683 - protein, 9 aa, Homo Sapiens
ATVPNALEF

SEQ ID NO: 164684 - protein, 9 aa, Homo Sapiens
ATVPNTIVV

SEQ ID NO: 164685 - protein, 9 aa, Homo Sapiens
ATVQRLPEL

SEQ ID NO: 164686 - protein, 9 aa, Homo Sapiens
ATVTQMHFL

SEQ ID NO: 164687 - protein, 9 aa, Homo Sapiens
ATVTSYLKL

SEQ ID NO: 164688 - protein, 9 aa, Homo Sapiens
ATVVTQLLV

SEQ ID NO: 164689 - protein, 9 aa, Homo Sapiens
ATYEDIVTL

SEQ ID NO: 164690 - protein, 9 aa, Homo Sapiens
ATYHHIIRL

SEQ ID NO: 164691 - protein, 9 aa, Homo Sapiens
ATYHRAIKV

SEQ ID NO: 164692 - protein, 9 aa, Homo Sapiens
ATYIFLQTF

SEQ ID NO: 164693 - protein, 9 aa, Homo Sapiens
ATYLRFIIV

SEQ ID NO: 164694 - protein, 9 aa, Homo Sapiens
ATYNFSQSL

SEQ ID NO: 164695 - protein, 9 aa, Homo Sapiens
ATYVFLHTV

SEQ ID NO: 164696 - protein, 9 aa, Homo Sapiens
AVAQYALFL

SEQ ID NO: 164697 - protein, 9 aa, Homo Sapiens
AVFGVPLIV

SEQ ID NO: 164698 - protein, 9 aa, Homo Sapiens
AVFPHLTVV

SEQ ID NO: 164699 - protein, 9 aa, Homo Sapiens
AVGPVHNSV

SEQ ID NO: 164700 - protein, 9 aa, Homo Sapiens
AVHNVPLSV

SEQ ID NO: 164701 - protein, 9 aa, Homo Sapiens
AVIGNFLYV

SEQ ID NO: 164702 - protein, 9 aa, Homo Sapiens
AVINRVQKV

SEQ ID NO: 164703 - protein, 9 aa, Homo Sapiens
AVMKQFAFV

SEQ ID NO: 164704 - protein, 9 aa, Homo Sapiens
AVNDHVLKV

SEQ ID NO: 164705 - protein, 9 aa, Homo Sapiens
AVNGKFVYV

SEQ ID NO: 164706 - protein, 9 aa, Homo Sapiens
AVNNFLLKV

SEQ ID NO: 164707 - protein, 9 aa, Homo Sapiens
AVNPHLFSL

SEQ ID NO: 164708 - protein, 9 aa, Homo Sapiens
AVNPLLRVI

SEQ ID NO: 164709 - protein, 9 aa, Homo Sapiens
AVTNMFLTV

SEQ ID NO: 164710 - protein, 9 aa, Homo Sapiens
AVVPKILTV

SEQ ID NO: 164711 - protein, 9 aa, Homo Sapiens
CSSPHALVL

SEQ ID NO: 164712 - protein, 9 aa, Homo Sapiens
DIRGKLLQV

SEQ ID NO: 164713 - protein, 9 aa, Homo Sapiens
DTNADKQLS

SEQ ID NO: 164714 - protein, 9 aa, Homo Sapiens
EALHYMLLV

SEQ ID NO: 164715 - protein, 9 aa, Homo Sapiens
ENGIKPVYV

SEQ ID NO: 164716 - protein, 9 aa, Homo Sapiens
ERTPHFALV

SEQ ID NO: 164717 - protein, 9 aa, Homo Sapiens
ESIPIRLFL

SEQ ID NO: 164718 - protein, 9 aa, Homo Sapiens
ESNHLLLMV

SEQ ID NO: 164719 - protein, 9 aa, Homo Sapiens
ESNTIHLKV

SEQ ID NO: 164720 - protein, 9 aa, Homo Sapiens
ESNVQILKL

SEQ ID NO: 164721 - protein, 9 aa, Homo Sapiens
ESYGNPLRV

SEQ ID NO: 164722 - protein, 9 aa, Homo Sapiens
ETNPSILEV

SEQ ID NO: 164723 - protein, 9 aa, Homo Sapiens
FADGHVLEL

SEQ ID NO: 164724 - protein, 9 aa, Homo Sapiens
FADKHIQVL

SEQ ID NO: 164725 - protein, 9 aa, Homo Sapiens
FAFRNFLYL

SEQ ID NO: 164726 - protein, 9 aa, Homo Sapiens
FAIDPHLLL

SEQ ID NO: 164727 - protein, 9 aa, Homo Sapiens
FAIKSLRKL

SEQ ID NO: 164728 - protein, 9 aa, Homo Sapiens
FALRVQQLV

SEQ ID NO: 164729 - protein, 9 aa, Homo Sapiens
FAMPYFIQV

SEQ ID NO: 164730 - protein, 9 aa, Homo Sapiens
FANNVQLSL

SEQ ID NO: 164731 - protein, 9 aa, Homo Sapiens
FASGLIHRV

SEQ ID NO: 164732 - protein, 9 aa, Homo Sapiens
FASHVSPEV

SEQ ID NO: 164733 - protein, 9 aa, Homo Sapiens
FATGVWHQM

SEQ ID NO: 164734 - protein, 9 aa, Homo Sapiens
FAYKNVKFV

SEQ ID NO: 164735 - protein, 9 aa, Homo Sapiens
FAYPAIRYL

SEQ ID NO: 164736 - protein, 9 aa, Homo Sapiens
FAYPAPLEV

SEQ ID NO: 164737 - protein, 9 aa, Homo Sapiens
FAYRGFKYL

SEQ ID NO: 164738 - protein, 9 aa, Homo Sapiens
FAYTARISV

SEQ ID NO: 164739 - protein, 9 aa, Homo Sapiens
FGNGFVLYV

SEQ ID NO: 164740 - protein, 9 aa, Homo Sapiens
FGNVVELRI

SEQ ID NO: 164741 - protein, 9 aa, Homo Sapiens
FGQRHRLLL

SEQ ID NO: 164742 - protein, 9 aa, Homo Sapiens
FGQRHRLVL

SEQ ID NO: 164743 - protein, 9 aa, Homo Sapiens
FGTIVNIQV

SEQ ID NO: 164744 - protein, 9 aa, Homo Sapiens
FGTKWMMFL

SEQ ID NO: 164745 - protein, 9 aa, Homo Sapiens
FINSRIITV

SEQ ID NO: 164746 - protein, 9 aa, Homo Sapiens
FLNKLVILV

SEQ ID NO: 164747 - protein, 9 aa, Homo Sapiens
FLTAAKKAR

SEQ ID NO: 164748 - protein, 9 aa, Homo Sapiens
FMNPHLISV

SEQ ID NO: 164749 - protein, 9 aa, Homo Sapiens
FNFFAPPEV

SEQ ID NO: 164750 - protein, 9 aa, Homo Sapiens
FNFFNPLKA

SEQ ID NO: 164751 - protein, 9 aa, Homo Sapiens
FNGAPVLYL

SEQ ID NO: 164752 - protein, 9 aa, Homo Sapiens
FNHPNILRL

SEQ ID NO: 164753 - protein, 9 aa, Homo Sapiens
FNIDKAREI

SEQ ID NO: 164754 - protein, 9 aa, Homo Sapiens
FNIDRLQEL

SEQ ID NO: 164755 - protein, 9 aa, Homo Sapiens
FNIEKGRLV

SEQ ID NO: 164756 - protein, 9 aa, Homo Sapiens
FNLSRIVTL

SEQ ID NO: 164757 - protein, 9 aa, Homo Sapiens
FNNGWMIKI

SEQ ID NO: 164758 - protein, 9 aa, Homo Sapiens
FNQERIVDV

SEQ ID NO: 164759 - protein, 9 aa, Homo Sapiens
FNQKFFQEL

SEQ ID NO: 164760 - protein, 9 aa, Homo Sapiens
FNRWFAEKF

SEQ ID NO: 164761 - protein, 9 aa, Homo Sapiens
FNSKQLLYL

SEQ ID NO: 164762 - protein, 9 aa, Homo Sapiens
FNSNVMVKV

SEQ ID NO: 164763 - protein, 9 aa, Homo Sapiens
FNSPRNLAM

SEQ ID NO: 164764 - protein, 9 aa, Homo Sapiens
FNTASALHL

SEQ ID NO: 164765 - protein, 9 aa, Homo Sapiens
FNTWKPMWV

SEQ ID NO: 164766 - protein, 9 aa, Homo Sapiens
FNVPAFLTV

SEQ ID NO: 164767 - protein, 9 aa, Homo Sapiens
FNWGRVVAL

SEQ ID NO: 164768 - protein, 9 aa, Homo Sapiens
FNYKSILIV

SEQ ID NO: 164769 - protein, 9 aa, Homo Sapiens
FQDPVPLTV

SEQ ID NO: 164770 - protein, 9 aa, Homo Sapiens
FQIGKMRYV

SEQ ID NO: 164771 - protein, 9 aa, Homo Sapiens
FQNDFLRLL

SEQ ID NO: 164772 - protein, 9 aa, Homo Sapiens
FQNIRPLFI

SEQ ID NO: 164773 - protein, 9 aa, Homo Sapiens
FQNLKVLLV

SEQ ID NO: 164774 - protein, 9 aa, Homo Sapiens
FQNVKQLYA

SEQ ID NO: 164775 - protein, 9 aa, Homo Sapiens
FQYPDTRYL

SEQ ID NO: 164776 - protein, 9 aa, Homo Sapiens
FSAGTFLYV

SEQ ID NO: 164777 - protein, 9 aa, Homo Sapiens
FSALRFLVV

SEQ ID NO: 164778 - protein, 9 aa, Homo Sapiens
FSAPSALRV

SEQ ID NO: 164779 - protein, 9 aa, Homo Sapiens
FSEGGERLL

SEQ ID NO: 164780 - protein, 9 aa, Homo Sapiens
FSEPFHLIV

SEQ ID NO: 164781 - protein, 9 aa, Homo Sapiens
FSESHLVII

SEQ ID NO: 164782 - protein, 9 aa, Homo Sapiens
FSFHHVLSL

SEQ ID NO: 164783 - protein, 9 aa, Homo Sapiens
FSFKKPFKL

SEQ ID NO: 164784 - protein, 9 aa, Homo Sapiens
FSFKKSFKL

SEQ ID NO: 164785 - protein, 9 aa, Homo Sapiens
FSFQRPLLV

SEQ ID NO: 164786 - protein, 9 aa, Homo Sapiens
FSFYFHEAL

SEQ ID NO: 164787 - protein, 9 aa, Homo Sapiens
FSHAQTVVL

SEQ ID NO: 164788 - protein, 9 aa, Homo Sapiens
FSHGQVVSL

SEQ ID NO: 164789 - protein, 9 aa, Homo Sapiens
FSHTVNLIV

SEQ ID NO: 164790 - protein, 9 aa, Homo Sapiens
FSIDPDLLV

SEQ ID NO: 164791 - protein, 9 aa, Homo Sapiens
FSIDRALNV

SEQ ID NO: 164792 - protein, 9 aa, Homo Sapiens
FSIEPWLKV

SEQ ID NO: 164793 - protein, 9 aa, Homo Sapiens
FSIKHPHTL

SEQ ID NO: 164794 - protein, 9 aa, Homo Sapiens
FSIKKIRFL

SEQ ID NO: 164795 - protein, 9 aa, Homo Sapiens
FSIKKTKQL

SEQ ID NO: 164796 - protein, 9 aa, Homo Sapiens
FSIKMFLTV

SEQ ID NO: 164797 - protein, 9 aa, Homo Sapiens
FSINVGHMV

SEQ ID NO: 164798 - protein, 9 aa, Homo Sapiens
FSIPDSLLI

SEQ ID NO: 164799 - protein, 9 aa, Homo Sapiens
FSIPILMQL

SEQ ID NO: 164800 - protein, 9 aa, Homo Sapiens
FSIPVVSDV

SEQ ID NO: 164801 - protein, 9 aa, Homo Sapiens
FSIRYQYLL

SEQ ID NO: 164802 - protein, 9 aa, Homo Sapiens
FSITPLSEL

SEQ ID NO: 164803 - protein, 9 aa, Homo Sapiens
FSKTEELNR

SEQ ID NO: 164804 - protein, 9 aa, Homo Sapiens
FSLDLVHTL

SEQ ID NO: 164805 - protein, 9 aa, Homo Sapiens
FSLDNARQV

SEQ ID NO: 164806 - protein, 9 aa, Homo Sapiens
FSLGVPRLI

SEQ ID NO: 164807 - protein, 9 aa, Homo Sapiens
FSNAGILKM

SEQ ID NO: 164808 - protein, 9 aa, Homo Sapiens
FSNDIPHVV

SEQ ID NO: 164809 - protein, 9 aa, Homo Sapiens
FSNGHIKVL

SEQ ID NO: 164810 - protein, 9 aa, Homo Sapiens
FSNPETLDL

SEQ ID NO: 164811 - protein, 9 aa, Homo Sapiens
FSNPNIQKI

SEQ ID NO: 164812 - protein, 9 aa, Homo Sapiens
FSNPRALYL

SEQ ID NO: 164813 - protein, 9 aa, Homo Sapiens
FSNVFEHYL

SEQ ID NO: 164814 - protein, 9 aa, Homo Sapiens
FSNVMIHVV

SEQ ID NO: 164815 - protein, 9 aa, Homo Sapiens
FSQKSFLVL

SEQ ID NO: 164816 - protein, 9 aa, Homo Sapiens
FSQPRHISV

SEQ ID NO: 164817 - protein, 9 aa, Homo Sapiens
FSQRTSLIV

SEQ ID NO: 164818 - protein, 9 aa, Homo Sapiens
FSREEFPTL

SEQ ID NO: 164819 - protein, 9 aa, Homo Sapiens
FSSDFTLKI

SEQ ID NO: 164820 - protein, 9 aa, Homo Sapiens
FSSDVTHEM

SEQ ID NO: 164821 - protein, 9 aa, Homo Sapiens
FSSHILVVV

SEQ ID NO: 164822 - protein, 9 aa, Homo Sapiens
FSSPHLVQV

SEQ ID NO: 164823 - protein, 9 aa, Homo Sapiens
FSSSYITAI

SEQ ID NO: 164824 - protein, 9 aa, Homo Sapiens
FSSWVQLEV

SEQ ID NO: 164825 - protein, 9 aa, Homo Sapiens
FSTASIMHL

SEQ ID NO: 164826 - protein, 9 aa, Homo Sapiens
FSTLFLETV

SEQ ID NO: 164827 - protein, 9 aa, Homo Sapiens
FSTSLVHSI

SEQ ID NO: 164828 - protein, 9 aa, Homo Sapiens
FSTTVIQNV

SEQ ID NO: 164829 - protein, 9 aa, Homo Sapiens
FSTVVIHFL

SEQ ID NO: 164830 - protein, 9 aa, Homo Sapiens
FSVGGLLKL

SEQ ID NO: 164831 - protein, 9 aa, Homo Sapiens
FSVNLFRTL

SEQ ID NO: 164832 - protein, 9 aa, Homo Sapiens
FSVPVKQEV

SEQ ID NO: 164833 - protein, 9 aa, Homo Sapiens
FSVVPSPKV

SEQ ID NO: 164834 - protein, 9 aa, Homo Sapiens
FSWKGINFV

SEQ ID NO: 164835 - protein, 9 aa, Homo Sapiens
FSYAFPKAV

SEQ ID NO: 164836 - protein, 9 aa, Homo Sapiens
FSYKDFDTL

SEQ ID NO: 164837 - protein, 9 aa, Homo Sapiens
FTAKFPLYM

SEQ ID NO: 164838 - protein, 9 aa, Homo Sapiens
FTAWRILEV

SEQ ID NO: 164839 - protein, 9 aa, Homo Sapiens
FTEKSGRLL

SEQ ID NO: 164840 - protein, 9 aa, Homo Sapiens
FTFKRIGYL

SEQ ID NO: 164841 - protein, 9 aa, Homo Sapiens
FTHDWMVFV

SEQ ID NO: 164842 - protein, 9 aa, Homo Sapiens
FTHLYTLIV

SEQ ID NO: 164843 - protein, 9 aa, Homo Sapiens
FTHSQFIVV

SEQ ID NO: 164844 - protein, 9 aa, Homo Sapiens
FTIFKAMMV

SEQ ID NO: 164845 - protein, 9 aa, Homo Sapiens
FTIFRTISV

SEQ ID NO: 164846 - protein, 9 aa, Homo Sapiens
FTISDPKLV

SEQ ID NO: 164847 - protein, 9 aa, Homo Sapiens
FTKTEELNR

SEQ ID NO: 164848 - protein, 9 aa, Homo Sapiens
FTLKKLLLL

SEQ ID NO: 164849 - protein, 9 aa, Homo Sapiens
FTLKTVLMI

SEQ ID NO: 164850 - protein, 9 aa, Homo Sapiens
FTLSHITQL

SEQ ID NO: 164851 - protein, 9 aa, Homo Sapiens
FTMKTVLML

SEQ ID NO: 164852 - protein, 9 aa, Homo Sapiens
FTNDKIINL

SEQ ID NO: 164853 - protein, 9 aa, Homo Sapiens
FTNGQTVNL

SEQ ID NO: 164854 - protein, 9 aa, Homo Sapiens
FTNRTVLEL

SEQ ID NO: 164855 - protein, 9 aa, Homo Sapiens
FTNTIKLIV

SEQ ID NO: 164856 - protein, 9 aa, Homo Sapiens
FTQKNILLV

SEQ ID NO: 164857 - protein, 9 aa, Homo Sapiens
FTRKGVLRV

SEQ ID NO: 164858 - protein, 9 aa, Homo Sapiens
FTSDIALRL

SEQ ID NO: 164859 - protein, 9 aa, Homo Sapiens
FTSPFCLQV

SEQ ID NO: 164860 - protein, 9 aa, Homo Sapiens
FTTSNIRKV

SEQ ID NO: 164861 - protein, 9 aa, Homo Sapiens
FTVDQIRAI

SEQ ID NO: 164862 - protein, 9 aa, Homo Sapiens
FTVKLRLLV

SEQ ID NO: 164863 - protein, 9 aa, Homo Sapiens
FTYHHIQEI

SEQ ID NO: 164864 - protein, 9 aa, Homo Sapiens
FTYKGLRAL

SEQ ID NO: 164865 - protein, 9 aa, Homo Sapiens
FTYNPFMRV

SEQ ID NO: 164866 - protein, 9 aa, Homo Sapiens
FVNDYILYY

SEQ ID NO: 164867 - protein, 9 aa, Homo Sapiens
GANEVLLVV

SEQ ID NO: 164868 - protein, 9 aa, Homo Sapiens
GAQLHQLVL

SEQ ID NO: 164869 - protein, 9 aa, Homo Sapiens
GAYKYIQEL

SEQ ID NO: 164870 - protein, 9 aa, Homo Sapiens
GAYTKILEV

SEQ ID NO: 164871 - protein, 9 aa, Homo Sapiens
GIMDRFLQV

SEQ ID NO: 164872 - protein, 9 aa, Homo Sapiens
GINPHVLQI

SEQ ID NO: 164873 - protein, 9 aa, Homo Sapiens
GIYTGFIKV

SEQ ID NO: 164874 - protein, 9 aa, Homo Sapiens
GKELPILQV

SEQ ID NO: 164875 - protein, 9 aa, Homo Sapiens
GLNTIPLFV

SEQ ID NO: 164876 - protein, 9 aa, Homo Sapiens
GNFFSPKVV

SEQ ID NO: 164877 - protein, 9 aa, Homo Sapiens
GNSGHFTII

SEQ ID NO: 164878 - protein, 9 aa, Homo Sapiens
GSDPRVTQL

SEQ ID NO: 164879 - protein, 9 aa, Homo Sapiens
GSFGKAILV

SEQ ID NO: 164880 - protein, 9 aa, Homo Sapiens
GSFGKVFLV

SEQ ID NO: 164881 - protein, 9 aa, Homo Sapiens
GSFGRVMLV

SEQ ID NO: 164882 - protein, 9 aa, Homo Sapiens
GSFHFDYEV

SEQ ID NO: 164883 - protein, 9 aa, Homo Sapiens
GSIPRSLEV

SEQ ID NO: 164884 - protein, 9 aa, Homo Sapiens
GSISGITMV

SEQ ID NO: 164885 - protein, 9 aa, Homo Sapiens
GSIWKQLYV

SEQ ID NO: 164886 - protein, 9 aa, Homo Sapiens
GSLPTILHV

SEQ ID NO: 164887 - protein, 9 aa, Homo Sapiens
GSLVHISYL

SEQ ID NO: 164888 - protein, 9 aa, Homo Sapiens
GSNLFKLEV

SEQ ID NO: 164889 - protein, 9 aa, Homo Sapiens
GSNPLKREI

SEQ ID NO: 164890 - protein, 9 aa, Homo Sapiens
GSNVKIVKV

SEQ ID NO: 164891 - protein, 9 aa, Homo Sapiens
GSSDRILEL

SEQ ID NO: 164892 - protein, 9 aa, Homo Sapiens
GSTDHIIRV

SEQ ID NO: 164893 - protein, 9 aa, Homo Sapiens
GSTEKVLRV

SEQ ID NO: 164894 - protein, 9 aa, Homo Sapiens
GSTRIITRL

SEQ ID NO: 164895 - protein, 9 aa, Homo Sapiens
GSTTVFHSL

SEQ ID NO: 164896 - protein, 9 aa, Homo Sapiens
GSVHIVHRL

SEQ ID NO: 164897 - protein, 9 aa, Homo Sapiens
GSVNRVTIL

SEQ ID NO: 164898 - protein, 9 aa, Homo Sapiens
GSVSNPLFL

SEQ ID NO: 164899 - protein, 9 aa, Homo Sapiens
GSVTVYYEV

SEQ ID NO: 164900 - protein, 9 aa, Homo Sapiens
GSWDGTLRL

SEQ ID NO: 164901 - protein, 9 aa, Homo Sapiens
GSYAKVLLV

SEQ ID NO: 164902 - protein, 9 aa, Homo Sapiens
GSYDKSVAL

SEQ ID NO: 164903 - protein, 9 aa, Homo Sapiens
GSYHRIRAL

SEQ ID NO: 164904 - protein, 9 aa, Homo Sapiens
GSYPQELIV

SEQ ID NO: 164905 - protein, 9 aa, Homo Sapiens
GSYVFENTV

SEQ ID NO: 164906 - protein, 9 aa, Homo Sapiens
GTFGKVILV

SEQ ID NO: 164907 - protein, 9 aa, Homo Sapiens
GTFLFLAEV

SEQ ID NO: 164908 - protein, 9 aa, Homo Sapiens
GTIGLIHAV

SEQ ID NO: 164909 - protein, 9 aa, Homo Sapiens
GTIKKFLSL

SEQ ID NO: 164910 - protein, 9 aa, Homo Sapiens
GTIMRVVEL

SEQ ID NO: 164911 - protein, 9 aa, Homo Sapiens
GTIPWFMEI

SEQ ID NO: 164912 - protein, 9 aa, Homo Sapiens
GTLNVFQTV

SEQ ID NO: 164913 - protein, 9 aa, Homo Sapiens
GTNFRVLLV

SEQ ID NO: 164914 - protein, 9 aa, Homo Sapiens
GTNFRVLWV

SEQ ID NO: 164915 - protein, 9 aa, Homo Sapiens
GTTDHVIVL

SEQ ID NO: 164916 - protein, 9 aa, Homo Sapiens
GTVPTPLVV

SEQ ID NO: 164917 - protein, 9 aa, Homo Sapiens
GTYTGFIKV

SEQ ID NO: 164918 - protein, 9 aa, Homo Sapiens
GVNVTQVFV

SEQ ID NO: 164919 - protein, 9 aa, Homo Sapiens
HAAKVILQV

SEQ ID NO: 164920 - protein, 9 aa, Homo Sapiens
HAASVFLTL

SEQ ID NO: 164921 - protein, 9 aa, Homo Sapiens
HAIHKVLQL

SEQ ID NO: 164922 - protein, 9 aa, Homo Sapiens
HAIQKYLEI

SEQ ID NO: 164923 - protein, 9 aa, Homo Sapiens
HANAKKILL

SEQ ID NO: 164924 - protein, 9 aa, Homo Sapiens
HANPILLLV

SEQ ID NO: 164925 - protein, 9 aa, Homo Sapiens
HAQPHHLLL

SEQ ID NO: 164926 - protein, 9 aa, Homo Sapiens
HAQTVVLCV

SEQ ID NO: 164927 - protein, 9 aa, Homo Sapiens
HASPGVLVV

SEQ ID NO: 164928 - protein, 9 aa, Homo Sapiens
HATLVFHNL

SEQ ID NO: 164929 - protein, 9 aa, Homo Sapiens
HAVHVALVL

SEQ ID NO: 164930 - protein, 9 aa, Homo Sapiens
HAVQYFLHV

SEQ ID NO: 164931 - protein, 9 aa, Homo Sapiens
HEGLPEPLT

SEQ ID NO: 164932 - protein, 9 aa, Homo Sapiens
HGLHRILVV

SEQ ID NO: 164933 - protein, 9 aa, Homo Sapiens
HGNWIRLYL

SEQ ID NO: 164934 - protein, 9 aa, Homo Sapiens
HIIEDALVV

SEQ ID NO: 164935 - protein, 9 aa, Homo Sapiens
HIIFHITLV

SEQ ID NO: 164936 - protein, 9 aa, Homo Sapiens
HILPHPVVV

SEQ ID NO: 164937 - protein, 9 aa, Homo Sapiens
HILTKILYL

SEQ ID NO: 164938 - protein, 9 aa, Homo Sapiens
HINIGALEL

SEQ ID NO: 164939 - protein, 9 aa, Homo Sapiens
HIPEVYLIV

SEQ ID NO: 164940 - protein, 9 aa, Homo Sapiens
HIVQKFLIL

SEQ ID NO: 164941 - protein, 9 aa, Homo Sapiens
HLTDITLKV

SEQ ID NO: 164942 - protein, 9 aa, Homo Sapiens
HLTPVTLEL

SEQ ID NO: 164943 - protein, 9 aa, Homo Sapiens
HMHIHISTV

SEQ ID NO: 164944 - protein, 9 aa, Homo Sapiens
HMSTVFLTL

SEQ ID NO: 164945 - protein, 9 aa, Homo Sapiens
HNADQPLRV

SEQ ID NO: 164946 - protein, 9 aa, Homo Sapiens
HNAGISFSV

SEQ ID NO: 164947 - protein, 9 aa, Homo Sapiens
HNEGYILEL

SEQ ID NO: 164948 - protein, 9 aa, Homo Sapiens
HNGIIFQFV

SEQ ID NO: 164949 - protein, 9 aa, Homo Sapiens
HNIAYQLQL

SEQ ID NO: 164950 - protein, 9 aa, Homo Sapiens
HNIGQTCCL

SEQ ID NO: 164951 - protein, 9 aa, Homo Sapiens
HNINRPLTM

SEQ ID NO: 164952 - protein, 9 aa, Homo Sapiens
HNISLVAQL

SEQ ID NO: 164953 - protein, 9 aa, Homo Sapiens
HNIWVILVV

SEQ ID NO: 164954 - protein, 9 aa, Homo Sapiens
HNLGRFITV

SEQ ID NO: 164955 - protein, 9 aa, Homo Sapiens
HNLISLLEV

SEQ ID NO: 164956 - protein, 9 aa, Homo Sapiens
HNLSKIMKL

SEQ ID NO: 164957 - protein, 9 aa, Homo Sapiens
HNLVHLLLL

SEQ ID NO: 164958 - protein, 9 aa, Homo Sapiens
HNNIIVLIV

SEQ ID NO: 164959 - protein, 9 aa, Homo Sapiens
HNQFIPLQV

SEQ ID NO: 164960 - protein, 9 aa, Homo Sapiens
HNSGVPVYL

SEQ ID NO: 164961 - protein, 9 aa, Homo Sapiens
HNSNIIKKL

SEQ ID NO: 164962 - protein, 9 aa, Homo Sapiens
HNVDIVLQV

SEQ ID NO: 164963 - protein, 9 aa, Homo Sapiens
HNVNRVVYI

SEQ ID NO: 164964 - protein, 9 aa, Homo Sapiens
HNYLQNVSM

SEQ ID NO: 164965 - protein, 9 aa, Homo Sapiens
HPDSHQLFI

SEQ ID NO: 164966 - protein, 9 aa, Homo Sapiens
HPNSAVLMV

SEQ ID NO: 164967 - protein, 9 aa, Homo Sapiens
HQIFHVLVV

SEQ ID NO: 164968 - protein, 9 aa, Homo Sapiens
HQMWHVRKL

SEQ ID NO: 164969 - protein, 9 aa, Homo Sapiens
HQNHLIVKV

SEQ ID NO: 164970 - protein, 9 aa, Homo Sapiens
HQTPLHLAV

SEQ ID NO: 164971 - protein, 9 aa, Homo Sapiens
HSAELALNV

SEQ ID NO: 164972 - protein, 9 aa, Homo Sapiens
HSAFIILLL

SEQ ID NO: 164973 - protein, 9 aa, Homo Sapiens
HSATPFLKV

SEQ ID NO: 164974 - protein, 9 aa, Homo Sapiens
HSAYTTLLL

SEQ ID NO: 164975 - protein, 9 aa, Homo Sapiens
HSDDYIKFL

SEQ ID NO: 164976 - protein, 9 aa, Homo Sapiens
HSDEYIKFL

SEQ ID NO: 164977 - protein, 9 aa, Homo Sapiens
HSETHLLYV

SEQ ID NO: 164978 - protein, 9 aa, Homo Sapiens
HSFFKISYL

SEQ ID NO: 164979 - protein, 9 aa, Homo Sapiens
HSFGHLKEV

SEQ ID NO: 164980 - protein, 9 aa, Homo Sapiens
HSFNIPMQL

SEQ ID NO: 164981 - protein, 9 aa, Homo Sapiens
HSFNVPMQL

SEQ ID NO: 164982 - protein, 9 aa, Homo Sapiens
HSFYNELRV

SEQ ID NO: 164983 - protein, 9 aa, Homo Sapiens
HSGPIHVLL

SEQ ID NO: 164984 - protein, 9 aa, Homo Sapiens
HSGPVVAMV

SEQ ID NO: 164985 - protein, 9 aa, Homo Sapiens
HSHHFLELV

SEQ ID NO: 164986 - protein, 9 aa, Homo Sapiens
HSHPRVVEL

SEQ ID NO: 164987 - protein, 9 aa, Homo Sapiens
HSIHWPCRL

SEQ ID NO: 164988 - protein, 9 aa, Homo Sapiens
HSIPVTVEV

SEQ ID NO: 164989 - protein, 9 aa, Homo Sapiens
HSISIPTKL

SEQ ID NO: 164990 - protein, 9 aa, Homo Sapiens
HSLDHLLKL

SEQ ID NO: 164991 - protein, 9 aa, Homo Sapiens
HSLDVIAFL

SEQ ID NO: 164992 - protein, 9 aa, Homo Sapiens
HSLIKVLRL

SEQ ID NO: 164993 - protein, 9 aa, Homo Sapiens
HSLPFELAL

SEQ ID NO: 164994 - protein, 9 aa, Homo Sapiens
HSLPLLLFI

SEQ ID NO: 164995 - protein, 9 aa, Homo Sapiens
HSLQHLLYV

SEQ ID NO: 164996 - protein, 9 aa, Homo Sapiens
HSLSFETQL

SEQ ID NO: 164997 - protein, 9 aa, Homo Sapiens
HSMSQPIMV

SEQ ID NO: 164998 - protein, 9 aa, Homo Sapiens
HSNEVIMTI

SEQ ID NO: 164999 - protein, 9 aa, Homo Sapiens
HSNSVPLAL

SEQ ID NO: 165000 - protein, 9 aa, Homo Sapiens
HSQLMRLMV

SEQ ID NO: 165001 - protein, 9 aa, Homo Sapiens
HSQQHVLVM

SEQ ID NO: 165002 - protein, 9 aa, Homo Sapiens
HSRFIFNYV

SEQ ID NO: 165003 - protein, 9 aa, Homo Sapiens
HSSIRSLEV

SEQ ID NO: 165004 - protein, 9 aa, Homo Sapiens
HSSSHIFKL

SEQ ID NO: 165005 - protein, 9 aa, Homo Sapiens
HSTDRVVLI

SEQ ID NO: 165006 - protein, 9 aa, Homo Sapiens
HSTIHLLKL

SEQ ID NO: 165007 - protein, 9 aa, Homo Sapiens
HSTNVLLSL

SEQ ID NO: 165008 - protein, 9 aa, Homo Sapiens
HSTVHLIEF

SEQ ID NO: 165009 - protein, 9 aa, Homo Sapiens
HSTYVFLMV

SEQ ID NO: 165010 - protein, 9 aa, Homo Sapiens
HSVDQYLNI

SEQ ID NO: 165011 - protein, 9 aa, Homo Sapiens
HSVPAPQHL

SEQ ID NO: 165012 - protein, 9 aa, Homo Sapiens
HSVPLQLEL

SEQ ID NO: 165013 - protein, 9 aa, Homo Sapiens
HSVPVVTVV

SEQ ID NO: 165014 - protein, 9 aa, Homo Sapiens
HSVSQPIMV

SEQ ID NO: 165015 - protein, 9 aa, Homo Sapiens
HSYADMREL

SEQ ID NO: 165016 - protein, 9 aa, Homo Sapiens
HTDTTVKFV

SEQ ID NO: 165017 - protein, 9 aa, Homo Sapiens
HTFYNELRV

SEQ ID NO: 165018 - protein, 9 aa, Homo Sapiens
HTIDTILTV

SEQ ID NO: 165019 - protein, 9 aa, Homo Sapiens
HTMDPQLRL

SEQ ID NO: 165020 - protein, 9 aa, Homo Sapiens
HTNIHLLVT

SEQ ID NO: 165021 - protein, 9 aa, Homo Sapiens
HTQIVRLLV

SEQ ID NO: 165022 - protein, 9 aa, Homo Sapiens
HTQNVPLSV

SEQ ID NO: 165023 - protein, 9 aa, Homo Sapiens
HTTAAFIRV

SEQ ID NO: 165024 - protein, 9 aa, Homo Sapiens
HTVGFILQL

SEQ ID NO: 165025 - protein, 9 aa, Homo Sapiens
HVITKTMEL

SEQ ID NO: 165026 - protein, 9 aa, Homo Sapiens
HVYPDHRLV

SEQ ID NO: 165027 - protein, 9 aa, Homo Sapiens
IAAKKVLRL

SEQ ID NO: 165028 - protein, 9 aa, Homo Sapiens
IAFYHKMEM

SEQ ID NO: 165029 - protein, 9 aa, Homo Sapiens
IAIGKVLKL

SEQ ID NO: 165030 - protein, 9 aa, Homo Sapiens
IANHQVLII

SEQ ID NO: 165031 - protein, 9 aa, Homo Sapiens
IANPTAMLL

SEQ ID NO: 165032 - protein, 9 aa, Homo Sapiens
IANQVQLFY

SEQ ID NO: 165033 - protein, 9 aa, Homo Sapiens
IANTSVIFV

SEQ ID NO: 165034 - protein, 9 aa, Homo Sapiens
IANTVELRV

SEQ ID NO: 165035 - protein, 9 aa, Homo Sapiens
IASNYHLEV

SEQ ID NO: 165036 - protein, 9 aa, Homo Sapiens
IATEIILEI

SEQ ID NO: 165037 - protein, 9 aa, Homo Sapiens
IAVNAVLTV

SEQ ID NO: 165038 - protein, 9 aa, Homo Sapiens
IAYKFGKTV

SEQ ID NO: 165039 - protein, 9 aa, Homo Sapiens
IFLMLTVIL

SEQ ID NO: 165040 - protein, 9 aa, Homo Sapiens
IGNGVVIHL

SEQ ID NO: 165041 - protein, 9 aa, Homo Sapiens
IGNLNTLVV

SEQ ID NO: 165042 - protein, 9 aa, Homo Sapiens
IGSKFRLVV

SEQ ID NO: 165043 - protein, 9 aa, Homo Sapiens
IGSKPLQIW

SEQ ID NO: 165044 - protein, 9 aa, Homo Sapiens
IGTDVYLRL

SEQ ID NO: 165045 - protein, 9 aa, Homo Sapiens
IGVSHPLSI

SEQ ID NO: 165046 - protein, 9 aa, Homo Sapiens
IGYGHVRAV

SEQ ID NO: 165047 - protein, 9 aa, Homo Sapiens
IGYPHLQEV

SEQ ID NO: 165048 - protein, 9 aa, Homo Sapiens
IIATPGRLV

SEQ ID NO: 165049 - protein, 9 aa, Homo Sapiens
IIDPVALEI

SEQ ID NO: 165050 - protein, 9 aa, Homo Sapiens
IIFDRDLVV

SEQ ID NO: 165051 - protein, 9 aa, Homo Sapiens
IIFEQIRFV

SEQ ID NO: 165052 - protein, 9 aa, Homo Sapiens
IIFETPLRV

SEQ ID NO: 165053 - protein, 9 aa, Homo Sapiens
IIFNKFRSV

SEQ ID NO: 165054 - protein, 9 aa, Homo Sapiens
IILGKSHYV

SEQ ID NO: 165055 - protein, 9 aa, Homo Sapiens
IILSKMMLM

SEQ ID NO: 165056 - protein, 9 aa, Homo Sapiens
IINEVVLKL

SEQ ID NO: 165057 - protein, 9 aa, Homo Sapiens
IINKHYMEV

SEQ ID NO: 165058 - protein, 9 aa, Homo Sapiens
IINPMGLLV

SEQ ID NO: 165059 - protein, 9 aa, Homo Sapiens
IINSNPIEL

SEQ ID NO: 165060 - protein, 9 aa, Homo Sapiens
IINTHTLLL

SEQ ID NO: 165061 - protein, 9 aa, Homo Sapiens
IIQTKALQV

SEQ ID NO: 165062 - protein, 9 aa, Homo Sapiens
IITKAYLEV

SEQ ID NO: 165063 - protein, 9 aa, Homo Sapiens
IIVDIFHGL

SEQ ID NO: 165064 - protein, 9 aa, Homo Sapiens
IIVDLARYV

SEQ ID NO: 165065 - protein, 9 aa, Homo Sapiens
IIYPRQQLL

SEQ ID NO: 165066 - protein, 9 aa, Homo Sapiens
IIYPTPKVV

SEQ ID NO: 165067 - protein, 9 aa, Homo Sapiens
ILLGNGMLL

SEQ ID NO: 165068 - protein, 9 aa, Homo Sapiens
ILNPYNLFL

SEQ ID NO: 165069 - protein, 9 aa, Homo Sapiens
ILSNKFLIV

SEQ ID NO: 165070 - protein, 9 aa, Homo Sapiens
ILYPKTLFL

SEQ ID NO: 165071 - protein, 9 aa, Homo Sapiens
INTENIRLV

SEQ ID NO: 165072 - protein, 9 aa, Homo Sapiens
INTPEVLRV

SEQ ID NO: 165073 - protein, 9 aa, Homo Sapiens
IQGNRVLVV

SEQ ID NO: 165074 - protein, 9 aa, Homo Sapiens
IQHVFQNLI

SEQ ID NO: 165075 - protein, 9 aa, Homo Sapiens
IQKLHIRTV

SEQ ID NO: 165076 - protein, 9 aa, Homo Sapiens
IQNLSLLLV

SEQ ID NO: 165077 - protein, 9 aa, Homo Sapiens
IQNPQILKV

SEQ ID NO: 165078 - protein, 9 aa, Homo Sapiens
IQRIFLITL

SEQ ID NO: 165079 - protein, 9 aa, Homo Sapiens
IQTAVRLLL

SEQ ID NO: 165080 - protein, 9 aa, Homo Sapiens
IQYDRTLLV

SEQ ID NO: 165081 - protein, 9 aa, Homo Sapiens
IQYIRPVFV

SEQ ID NO: 165082 - protein, 9 aa, Homo Sapiens
IRNIHNDEL

SEQ ID NO: 165083 - protein, 9 aa, Homo Sapiens
ISDGVVLFI

SEQ ID NO: 165084 - protein, 9 aa, Homo Sapiens
ISDKVLKKI

SEQ ID NO: 165085 - protein, 9 aa, Homo Sapiens
ISDYAVKIV

SEQ ID NO: 165086 - protein, 9 aa, Homo Sapiens
ISEEGFHYL

SEQ ID NO: 165087 - protein, 9 aa, Homo Sapiens
ISFENYRKV

SEQ ID NO: 165088 - protein, 9 aa, Homo Sapiens
ISFEYDLRL

SEQ ID NO: 165089 - protein, 9 aa, Homo Sapiens
ISFPAPLYI

SEQ ID NO: 165090 - protein, 9 aa, Homo Sapiens
ISFQNPRTV

SEQ ID NO: 165091 - protein, 9 aa, Homo Sapiens
ISGGKPLEV

SEQ ID NO: 165092 - protein, 9 aa, Homo Sapiens
ISHKRVLEV

SEQ ID NO: 165093 - protein, 9 aa, Homo Sapiens
ISHTQTRLL

SEQ ID NO: 165094 - protein, 9 aa, Homo Sapiens
ISIDSPQKL

SEQ ID NO: 165095 - protein, 9 aa, Homo Sapiens
ISIPAVQKV

SEQ ID NO: 165096 - protein, 9 aa, Homo Sapiens
ISISAVQWL

SEQ ID NO: 165097 - protein, 9 aa, Homo Sapiens
ISISRVDKL

SEQ ID NO: 165098 - protein, 9 aa, Homo Sapiens
ISLEHEILL

SEQ ID NO: 165099 - protein, 9 aa, Homo Sapiens
ISLEKQLQV

SEQ ID NO: 165100 - protein, 9 aa, Homo Sapiens
ISLLHLSLL

SEQ ID NO: 165101 - protein, 9 aa, Homo Sapiens
ISLLMRLVV

SEQ ID NO: 165102 - protein, 9 aa, Homo Sapiens
ISLPHPMEI

SEQ ID NO: 165103 - protein, 9 aa, Homo Sapiens
ISLQHALYL

SEQ ID NO: 165104 - protein, 9 aa, Homo Sapiens
ISMEVPVMV

SEQ ID NO: 165105 - protein, 9 aa, Homo Sapiens
ISNDKFEYL

SEQ ID NO: 165106 - protein, 9 aa, Homo Sapiens
ISNEFIVLI

SEQ ID NO: 165107 - protein, 9 aa, Homo Sapiens
ISNEFVVLL

SEQ ID NO: 165108 - protein, 9 aa, Homo Sapiens
ISNFHVLLL

SEQ ID NO: 165109 - protein, 9 aa, Homo Sapiens
ISNPNSIIL

SEQ ID NO: 165110 - protein, 9 aa, Homo Sapiens
ISNPPILLV

SEQ ID NO: 165111 - protein, 9 aa, Homo Sapiens
ISNPYSRKV

SEQ ID NO: 165112 - protein, 9 aa, Homo Sapiens
ISNSHPLSL

SEQ ID NO: 165113 - protein, 9 aa, Homo Sapiens
ISNSSVVKV

SEQ ID NO: 165114 - protein, 9 aa, Homo Sapiens
ISNVLKLYL

SEQ ID NO: 165115 - protein, 9 aa, Homo Sapiens
ISSFQYLIV

SEQ ID NO: 165116 - protein, 9 aa, Homo Sapiens
ISSHIPLII

SEQ ID NO: 165117 - protein, 9 aa, Homo Sapiens
ISSPVILQF

SEQ ID NO: 165118 - protein, 9 aa, Homo Sapiens
ISSPVVTSL

SEQ ID NO: 165119 - protein, 9 aa, Homo Sapiens
ISSSIQLLV

SEQ ID NO: 165120 - protein, 9 aa, Homo Sapiens
ISSVPHGEL

SEQ ID NO: 165121 - protein, 9 aa, Homo Sapiens
ISTVEVLKV

SEQ ID NO: 165122 - protein, 9 aa, Homo Sapiens
ISYDRTLVI

SEQ ID NO: 165123 - protein, 9 aa, Homo Sapiens
ISYENMRFL

SEQ ID NO: 165124 - protein, 9 aa, Homo Sapiens
ISYLRVRKL

SEQ ID NO: 165125 - protein, 9 aa, Homo Sapiens
ITDPRTVFV

SEQ ID NO: 165126 - protein, 9 aa, Homo Sapiens
ITFPGLHEL

SEQ ID NO: 165127 - protein, 9 aa, Homo Sapiens
ITFSNPKEV

SEQ ID NO: 165128 - protein, 9 aa, Homo Sapiens
ITLDLIRVL

SEQ ID NO: 165129 - protein, 9 aa, Homo Sapiens
ITNELILRL

SEQ ID NO: 165130 - protein, 9 aa, Homo Sapiens
ITNGSRIEI

SEQ ID NO: 165131 - protein, 9 aa, Homo Sapiens
ITNIVILSL

SEQ ID NO: 165132 - protein, 9 aa, Homo Sapiens
ITNKYQLVF

SEQ ID NO: 165133 - protein, 9 aa, Homo Sapiens
ITNLQLLKI

SEQ ID NO: 165134 - protein, 9 aa, Homo Sapiens
ITNVAELLV

SEQ ID NO: 165135 - protein, 9 aa, Homo Sapiens
ITNVQILIL

SEQ ID NO: 165136 - protein, 9 aa, Homo Sapiens
ITPENLPQI

SEQ ID NO: 165137 - protein, 9 aa, Homo Sapiens
ITPQKLPSL

SEQ ID NO: 165138 - protein, 9 aa, Homo Sapiens
ITQERIVFL

SEQ ID NO: 165139 - protein, 9 aa, Homo Sapiens
ITRARFEEL

SEQ ID NO: 165140 - protein, 9 aa, Homo Sapiens
ITSPVHVSF

SEQ ID NO: 165141 - protein, 9 aa, Homo Sapiens
ITSVFITKV

SEQ ID NO: 165142 - protein, 9 aa, Homo Sapiens
ITTLHNLLL

SEQ ID NO: 165143 - protein, 9 aa, Homo Sapiens
ITVEKALAI

SEQ ID NO: 165144 - protein, 9 aa, Homo Sapiens
ITVHRHLML

SEQ ID NO: 165145 - protein, 9 aa, Homo Sapiens
ITVPVFHLF

SEQ ID NO: 165146 - protein, 9 aa, Homo Sapiens
ITYGQFAQL

SEQ ID NO: 165147 - protein, 9 aa, Homo Sapiens
IVATKPLYV

SEQ ID NO: 165148 - protein, 9 aa, Homo Sapiens
IVGSKPLYV

SEQ ID NO: 165149 - protein, 9 aa, Homo Sapiens
IVIGIIKTV

SEQ ID NO: 165150 - protein, 9 aa, Homo Sapiens
IVMEHVVFL

SEQ ID NO: 165151 - protein, 9 aa, Homo Sapiens
IVMPNILVL

SEQ ID NO: 165152 - protein, 9 aa, Homo Sapiens
IVNGHTLLV

SEQ ID NO: 165153 - protein, 9 aa, Homo Sapiens
IVNGQIHSV

SEQ ID NO: 165154 - protein, 9 aa, Homo Sapiens
IVNPTIVLL

SEQ ID NO: 165155 - protein, 9 aa, Homo Sapiens
IVNRISLFL

SEQ ID NO: 165156 - protein, 9 aa, Homo Sapiens
IVQNGRLIV

SEQ ID NO: 165157 - protein, 9 aa, Homo Sapiens
IVVPKAAIV

SEQ ID NO: 165158 - protein, 9 aa, Homo Sapiens
IVYPKPTWL

SEQ ID NO: 165159 - protein, 9 aa, Homo Sapiens
KAADRLPNL

SEQ ID NO: 165160 - protein, 9 aa, Homo Sapiens
KAAHFFSTL

SEQ ID NO: 165161 - protein, 9 aa, Homo Sapiens
KADMNVHLL

SEQ ID NO: 165162 - protein, 9 aa, Homo Sapiens
KAEEHILKL

SEQ ID NO: 165163 - protein, 9 aa, Homo Sapiens
KAEGKVRLL

SEQ ID NO: 165164 - protein, 9 aa, Homo Sapiens
KAFEHLQQL

SEQ ID NO: 165165 - protein, 9 aa, Homo Sapiens
KAFFAKMVV

SEQ ID NO: 165166 - protein, 9 aa, Homo Sapiens
KAFKGSIFV

SEQ ID NO: 165167 - protein, 9 aa, Homo Sapiens
KAFNWFSTL

SEQ ID NO: 165168 - protein, 9 aa, Homo Sapiens
KAFYFLNSV

SEQ ID NO: 165169 - protein, 9 aa, Homo Sapiens
KAGVAPLQV

SEQ ID NO: 165170 - protein, 9 aa, Homo Sapiens
KAHLMEIQV

SEQ ID NO: 165171 - protein, 9 aa, Homo Sapiens
KAIDFAASL

SEQ ID NO: 165172 - protein, 9 aa, Homo Sapiens
KAIDVVVMV

SEQ ID NO: 165173 - protein, 9 aa, Homo Sapiens
KAIDYIKYL

SEQ ID NO: 165174 - protein, 9 aa, Homo Sapiens
KAIDYIRFL

SEQ ID NO: 165175 - protein, 9 aa, Homo Sapiens
KAIDYYLKA

SEQ ID NO: 165176 - protein, 9 aa, Homo Sapiens
KAIELQLQV

SEQ ID NO: 165177 - protein, 9 aa, Homo Sapiens
KAIEVLLTL

SEQ ID NO: 165178 - protein, 9 aa, Homo Sapiens
KAISGVHTV

SEQ ID NO: 165179 - protein, 9 aa, Homo Sapiens
KALELWMQL

SEQ ID NO: 165180 - protein, 9 aa, Homo Sapiens
KALETLRQV

SEQ ID NO: 165181 - protein, 9 aa, Homo Sapiens
KALEVFPEF

SEQ ID NO: 165182 - protein, 9 aa, Homo Sapiens
KALQHERLV

SEQ ID NO: 165183 - protein, 9 aa, Homo Sapiens
KALSIFNEL

SEQ ID NO: 165184 - protein, 9 aa, Homo Sapiens
KALSIILHL

SEQ ID NO: 165185 - protein, 9 aa, Homo Sapiens
KAMELIREL

SEQ ID NO: 165186 - protein, 9 aa, Homo Sapiens
KAMGYQPLV

SEQ ID NO: 165187 - protein, 9 aa, Homo Sapiens
KANDWLQFI

SEQ ID NO: 165188 - protein, 9 aa, Homo Sapiens
KANEVISKL

SEQ ID NO: 165189 - protein, 9 aa, Homo Sapiens
KANHAELIL

SEQ ID NO: 165190 - protein, 9 aa, Homo Sapiens
KANIVHLML

SEQ ID NO: 165191 - protein, 9 aa, Homo Sapiens
KANMRALEL

SEQ ID NO: 165192 - protein, 9 aa, Homo Sapiens
KANPALYVL

SEQ ID NO: 165193 - protein, 9 aa, Homo Sapiens
KAQTKLLIL

SEQ ID NO: 165194 - protein, 9 aa, Homo Sapiens
KASEKILQV

SEQ ID NO: 165195 - protein, 9 aa, Homo Sapiens
KASHILISV

SEQ ID NO: 165196 - protein, 9 aa, Homo Sapiens
KASPLTFTV

SEQ ID NO: 165197 - protein, 9 aa, Homo Sapiens
KATAYILSV

SEQ ID NO: 165198 - protein, 9 aa, Homo Sapiens
KATEKILKM

SEQ ID NO: 165199 - protein, 9 aa, Homo Sapiens
KAVDIVKQV

SEQ ID NO: 165200 - protein, 9 aa, Homo Sapiens
KAVDRSLQL

SEQ ID NO: 165201 - protein, 9 aa, Homo Sapiens
KAVEAGLRV

SEQ ID NO: 165202 - protein, 9 aa, Homo Sapiens
KAVEIYASV

SEQ ID NO: 165203 - protein, 9 aa, Homo Sapiens
KAVFPLLYV

SEQ ID NO: 165204 - protein, 9 aa, Homo Sapiens
KAVHVIYTV

SEQ ID NO: 165205 - protein, 9 aa, Homo Sapiens
KAVLAGQFV

SEQ ID NO: 165206 - protein, 9 aa, Homo Sapiens
KAVQPLLKV

SEQ ID NO: 165207 - protein, 9 aa, Homo Sapiens
KAVQQVQRL

SEQ ID NO: 165208 - protein, 9 aa, Homo Sapiens
KAYEIMREL

SEQ ID NO: 165209 - protein, 9 aa, Homo Sapiens
KAYELALYL

SEQ ID NO: 165210 - protein, 9 aa, Homo Sapiens
KAYHEQLSV

SEQ ID NO: 165211 - protein, 9 aa, Homo Sapiens
KAYHEQLTV

SEQ ID NO: 165212 - protein, 9 aa, Homo Sapiens
KAYKAYRLL

SEQ ID NO: 165213 - protein, 9 aa, Homo Sapiens
KCLELFSEL

SEQ ID NO: 165214 - protein, 9 aa, Homo Sapiens
KCLELFTEL

SEQ ID NO: 165215 - protein, 9 aa, Homo Sapiens
KGFDFTLMV

SEQ ID NO: 165216 - protein, 9 aa, Homo Sapiens
KGFDWPLLV

SEQ ID NO: 165217 - protein, 9 aa, Homo Sapiens
KGFLFLHTL

SEQ ID NO: 165218 - protein, 9 aa, Homo Sapiens
KGIETYLII

SEQ ID NO: 165219 - protein, 9 aa, Homo Sapiens
KGIGHVIKV

SEQ ID NO: 165220 - protein, 9 aa, Homo Sapiens
KGNDTPLAL

SEQ ID NO: 165221 - protein, 9 aa, Homo Sapiens
KGQWSPLKV

SEQ ID NO: 165222 - protein, 9 aa, Homo Sapiens
KGSSYKLLV

SEQ ID NO: 165223 - protein, 9 aa, Homo Sapiens
KGTEFFLKV

SEQ ID NO: 165224 - protein, 9 aa, Homo Sapiens
KGYGKILEV

SEQ ID NO: 165225 - protein, 9 aa, Homo Sapiens
KIAPNTPQL

SEQ ID NO: 165226 - protein, 9 aa, Homo Sapiens
KIDDTIRYL

SEQ ID NO: 165227 - protein, 9 aa, Homo Sapiens
KIEVSFREL

SEQ ID NO: 165228 - protein, 9 aa, Homo Sapiens
KIFDNFSNL

SEQ ID NO: 165229 - protein, 9 aa, Homo Sapiens
KIFPAALQL

SEQ ID NO: 165230 - protein, 9 aa, Homo Sapiens
KIFQEMLYI

SEQ ID NO: 165231 - protein, 9 aa, Homo Sapiens
KIHSSFRSL

SEQ ID NO: 165232 - protein, 9 aa, Homo Sapiens
KIIDEQLVC

SEQ ID NO: 165233 - protein, 9 aa, Homo Sapiens
KIIDFLSAL

SEQ ID NO: 165234 - protein, 9 aa, Homo Sapiens
KIIDGLLVM

SEQ ID NO: 165235 - protein, 9 aa, Homo Sapiens
KIIDIFTTL

SEQ ID NO: 165236 - protein, 9 aa, Homo Sapiens
KIIEARLKM

SEQ ID NO: 165237 - protein, 9 aa, Homo Sapiens
KIIEILQFI

SEQ ID NO: 165238 - protein, 9 aa, Homo Sapiens
KIIEYSVYL

SEQ ID NO: 165239 - protein, 9 aa, Homo Sapiens
KIIGIMEEV

SEQ ID NO: 165240 - protein, 9 aa, Homo Sapiens
KIIWMPQEL

SEQ ID NO: 165241 - protein, 9 aa, Homo Sapiens
KILAAILHL

SEQ ID NO: 165242 - protein, 9 aa, Homo Sapiens
KILASFREM

SEQ ID NO: 165243 - protein, 9 aa, Homo Sapiens
KILEIIRVI

SEQ ID NO: 165244 - protein, 9 aa, Homo Sapiens
KILERTEIL

SEQ ID NO: 165245 - protein, 9 aa, Homo Sapiens
KILISILYV

SEQ ID NO: 165246 - protein, 9 aa, Homo Sapiens
KILTHVAEM

SEQ ID NO: 165247 - protein, 9 aa, Homo Sapiens
KILTKLLEV

SEQ ID NO: 165248 - protein, 9 aa, Homo Sapiens
KIMDYSLLL

SEQ ID NO: 165249 - protein, 9 aa, Homo Sapiens
KIMDYSLLM

SEQ ID NO: 165250 - protein, 9 aa, Homo Sapiens
KIMDYSLLV

SEQ ID NO: 165251 - protein, 9 aa, Homo Sapiens
KIMQQFQEL

SEQ ID NO: 165252 - protein, 9 aa, Homo Sapiens
KINALMHAL

SEQ ID NO: 165253 - protein, 9 aa, Homo Sapiens
KINEAFIEM

SEQ ID NO: 165254 - protein, 9 aa, Homo Sapiens
KINEAIVAV

SEQ ID NO: 165255 - protein, 9 aa, Homo Sapiens
KINEKPQVI

SEQ ID NO: 165256 - protein, 9 aa, Homo Sapiens
KINEKVLQV

SEQ ID NO: 165257 - protein, 9 aa, Homo Sapiens
KINELELRL

SEQ ID NO: 165258 - protein, 9 aa, Homo Sapiens
KINEWLTLV

SEQ ID NO: 165259 - protein, 9 aa, Homo Sapiens
KINFNTRFV

SEQ ID NO: 165260 - protein, 9 aa, Homo Sapiens
KINGFPIFL

SEQ ID NO: 165261 - protein, 9 aa, Homo Sapiens
KINNKVVQL

SEQ ID NO: 165262 - protein, 9 aa, Homo Sapiens
KINPMQLGV

SEQ ID NO: 165263 - protein, 9 aa, Homo Sapiens
KINQLPLFL

SEQ ID NO: 165264 - protein, 9 aa, Homo Sapiens
KIQEILTQV

SEQ ID NO: 165265 - protein, 9 aa, Homo Sapiens
KIRPHIATL

SEQ ID NO: 165266 - protein, 9 aa, Homo Sapiens
KISDWALKL

SEQ ID NO: 165267 - protein, 9 aa, Homo Sapiens
KISEWQVKL

SEQ ID NO: 165268 - protein, 9 aa, Homo Sapiens
KITDHFMRL

SEQ ID NO: 165269 - protein, 9 aa, Homo Sapiens
KITEDFRAL

SEQ ID NO: 165270 - protein, 9 aa, Homo Sapiens
KITEPFLVV

SEQ ID NO: 165271 - protein, 9 aa, Homo Sapiens
KITGMLLEI

SEQ ID NO: 165272 - protein, 9 aa, Homo Sapiens
KITQQMPKV

SEQ ID NO: 165273 - protein, 9 aa, Homo Sapiens
KITTVIQHV

SEQ ID NO: 165274 - protein, 9 aa, Homo Sapiens
KITWYILVL

SEQ ID NO: 165275 - protein, 9 aa, Homo Sapiens
KIYAIPQEV

SEQ ID NO: 165276 - protein, 9 aa, Homo Sapiens
KIYEEPIIL

SEQ ID NO: 165277 - protein, 9 aa, Homo Sapiens
KIYEGQVEV

SEQ ID NO: 165278 - protein, 9 aa, Homo Sapiens
KIYEHHIKV

SEQ ID NO: 165279 - protein, 9 aa, Homo Sapiens
KIYEPPRYM

SEQ ID NO: 165280 - protein, 9 aa, Homo Sapiens
KIYERTMAV

SEQ ID NO: 165281 - protein, 9 aa, Homo Sapiens
KIYISKIVV

SEQ ID NO: 165282 - protein, 9 aa, Homo Sapiens
KIYPGWLKV

SEQ ID NO: 165283 - protein, 9 aa, Homo Sapiens
KIYSGDLVV

SEQ ID NO: 165284 - protein, 9 aa, Homo Sapiens
KLAEIRHEV

SEQ ID NO: 165285 - protein, 9 aa, Homo Sapiens
KLFDRPQEL

SEQ ID NO: 165286 - protein, 9 aa, Homo Sapiens
KLFEEFLEL

SEQ ID NO: 165287 - protein, 9 aa, Homo Sapiens
KLITSFLEL

SEQ ID NO: 165288 - protein, 9 aa, Homo Sapiens
KLLEFQLAL

SEQ ID NO: 165289 - protein, 9 aa, Homo Sapiens
KLNATNIEL

SEQ ID NO: 165290 - protein, 9 aa, Homo Sapiens
KLNGQVLVF

SEQ ID NO: 165291 - protein, 9 aa, Homo Sapiens
KLNPNFLQL

SEQ ID NO: 165292 - protein, 9 aa, Homo Sapiens
KLNPQQFEV

SEQ ID NO: 165293 - protein, 9 aa, Homo Sapiens
KLNQAHLEV

SEQ ID NO: 165294 - protein, 9 aa, Homo Sapiens
KLNQDVLLV

SEQ ID NO: 165295 - protein, 9 aa, Homo Sapiens
KLNVWVALL

SEQ ID NO: 165296 - protein, 9 aa, Homo Sapiens
KLPSNLPQL

SEQ ID NO: 165297 - protein, 9 aa, Homo Sapiens
KLSELQLRV

SEQ ID NO: 165298 - protein, 9 aa, Homo Sapiens
KLSETFLHI

SEQ ID NO: 165299 - protein, 9 aa, Homo Sapiens
KLTEIRHEV

SEQ ID NO: 165300 - protein, 9 aa, Homo Sapiens
KLVGEFLEV

SEQ ID NO: 165301 - protein, 9 aa, Homo Sapiens
KLYDGFQYL

SEQ ID NO: 165302 - protein, 9 aa, Homo Sapiens
KLYEKFLEF

SEQ ID NO: 165303 - protein, 9 aa, Homo Sapiens
KLYGKPIRV

SEQ ID NO: 165304 - protein, 9 aa, Homo Sapiens
KLYTGLREV

SEQ ID NO: 165305 - protein, 9 aa, Homo Sapiens
KMAPALRKV

SEQ ID NO: 165306 - protein, 9 aa, Homo Sapiens
KMDDKALLV

SEQ ID NO: 165307 - protein, 9 aa, Homo Sapiens
KMLGYFSLV

SEQ ID NO: 165308 - protein, 9 aa, Homo Sapiens
KMMDVTVTI

SEQ ID NO: 165309 - protein, 9 aa, Homo Sapiens
KMMELFIRL

SEQ ID NO: 165310 - protein, 9 aa, Homo Sapiens
KMNEKLYTV

SEQ ID NO: 165311 - protein, 9 aa, Homo Sapiens
KMNGHLRLL

SEQ ID NO: 165312 - protein, 9 aa, Homo Sapiens
KMSEKILLL

SEQ ID NO: 165313 - protein, 9 aa, Homo Sapiens
KNADHLLHL

SEQ ID NO: 165314 - protein, 9 aa, Homo Sapiens
KNADKVLEL

SEQ ID NO: 165315 - protein, 9 aa, Homo Sapiens
KNFEEFFNL

SEQ ID NO: 165316 - protein, 9 aa, Homo Sapiens
KNFKAFASL

SEQ ID NO: 165317 - protein, 9 aa, Homo Sapiens
KNFSVSHLL

SEQ ID NO: 165318 - protein, 9 aa, Homo Sapiens
KNIDHMLWL

SEQ ID NO: 165319 - protein, 9 aa, Homo Sapiens
KNIEKIIHV

SEQ ID NO: 165320 - protein, 9 aa, Homo Sapiens
KNIERTLYF

SEQ ID NO: 165321 - protein, 9 aa, Homo Sapiens
KNIFLNQVL

SEQ ID NO: 165322 - protein, 9 aa, Homo Sapiens
KNINKPLDI

SEQ ID NO: 165323 - protein, 9 aa, Homo Sapiens
KNIPEILKI

SEQ ID NO: 165324 - protein, 9 aa, Homo Sapiens
KNIPEIVAV

SEQ ID NO: 165325 - protein, 9 aa, Homo Sapiens
KNIPMTLEL

SEQ ID NO: 165326 - protein, 9 aa, Homo Sapiens
KNIYTIREV

SEQ ID NO: 165327 - protein, 9 aa, Homo Sapiens
KNIYVLQEL

SEQ ID NO: 165328 - protein, 9 aa, Homo Sapiens
KNKWFFQKL

SEQ ID NO: 165329 - protein, 9 aa, Homo Sapiens
KNLDLLSQL

SEQ ID NO: 165330 - protein, 9 aa, Homo Sapiens
KNLEVFMHV

SEQ ID NO: 165331 - protein, 9 aa, Homo Sapiens
KNLGRLTRL

SEQ ID NO: 165332 - protein, 9 aa, Homo Sapiens
KNLLHAEFL

SEQ ID NO: 165333 - protein, 9 aa, Homo Sapiens
KNMEKLVKL

SEQ ID NO: 165334 - protein, 9 aa, Homo Sapiens
KNNASKLLL

SEQ ID NO: 165335 - protein, 9 aa, Homo Sapiens
KNQDHLLKL

SEQ ID NO: 165336 - protein, 9 aa, Homo Sapiens
KNSGVLMVV

SEQ ID NO: 165337 - protein, 9 aa, Homo Sapiens
KNSHLINVL

SEQ ID NO: 165338 - protein, 9 aa, Homo Sapiens
KNSPLVSRL

SEQ ID NO: 165339 - protein, 9 aa, Homo Sapiens
KNTEMVISV

SEQ ID NO: 165340 - protein, 9 aa, Homo Sapiens
KNTEVNLML

SEQ ID NO: 165341 - protein, 9 aa, Homo Sapiens
KNTIYPLTV

SEQ ID NO: 165342 - protein, 9 aa, Homo Sapiens
KNVDKVLEV

SEQ ID NO: 165343 - protein, 9 aa, Homo Sapiens
KNYDFAQVL

SEQ ID NO: 165344 - protein, 9 aa, Homo Sapiens
KNYDRFHYL

SEQ ID NO: 165345 - protein, 9 aa, Homo Sapiens
KQIDQFLVV

SEQ ID NO: 165346 - protein, 9 aa, Homo Sapiens
KQIDVYRSV

SEQ ID NO: 165347 - protein, 9 aa, Homo Sapiens
KQNGHIKFL

SEQ ID NO: 165348 - protein, 9 aa, Homo Sapiens
KQNIKLLDL

SEQ ID NO: 165349 - protein, 9 aa, Homo Sapiens
KQQQWLLYL

SEQ ID NO: 165350 - protein, 9 aa, Homo Sapiens
KQSDVMRFL

SEQ ID NO: 165351 - protein, 9 aa, Homo Sapiens
KQSNVQILV

SEQ ID NO: 165352 - protein, 9 aa, Homo Sapiens
KQSTSFLVL

SEQ ID NO: 165353 - protein, 9 aa, Homo Sapiens
KQTPKVLVV

SEQ ID NO: 165354 - protein, 9 aa, Homo Sapiens
KQYDKALEI

SEQ ID NO: 165355 - protein, 9 aa, Homo Sapiens
KQYGFFSYL

SEQ ID NO: 165356 - protein, 9 aa, Homo Sapiens
KQYPISLVL

SEQ ID NO: 165357 - protein, 9 aa, Homo Sapiens
KSAIPHPLI

SEQ ID NO: 165358 - protein, 9 aa, Homo Sapiens
KSANRVLRI

SEQ ID NO: 165359 - protein, 9 aa, Homo Sapiens
KSAVVQLTV

SEQ ID NO: 165360 - protein, 9 aa, Homo Sapiens
KSCEKIHFI

SEQ ID NO: 165361 - protein, 9 aa, Homo Sapiens
KSDLRLIEV

SEQ ID NO: 165362 - protein, 9 aa, Homo Sapiens
KSDPSIVRL

SEQ ID NO: 165363 - protein, 9 aa, Homo Sapiens
KSDSHVRML

SEQ ID NO: 165364 - protein, 9 aa, Homo Sapiens
KSDYIKLYV

SEQ ID NO: 165365 - protein, 9 aa, Homo Sapiens
KSESGLRVL

SEQ ID NO: 165366 - protein, 9 aa, Homo Sapiens
KSFAHILEL

SEQ ID NO: 165367 - protein, 9 aa, Homo Sapiens
KSFALLPRL

SEQ ID NO: 165368 - protein, 9 aa, Homo Sapiens
KSFEAPIKL

SEQ ID NO: 165369 - protein, 9 aa, Homo Sapiens
KSFEGLFYF

SEQ ID NO: 165370 - protein, 9 aa, Homo Sapiens
KSFEGNVFM

SEQ ID NO: 165371 - protein, 9 aa, Homo Sapiens
KSFEKLMKI

SEQ ID NO: 165372 - protein, 9 aa, Homo Sapiens
KSFFEAKKL

SEQ ID NO: 165373 - protein, 9 aa, Homo Sapiens
KSFGDTKFV

SEQ ID NO: 165374 - protein, 9 aa, Homo Sapiens
KSFHFPLFM

SEQ ID NO: 165375 - protein, 9 aa, Homo Sapiens
KSFIHIKEV

SEQ ID NO: 165376 - protein, 9 aa, Homo Sapiens
KSFLFEPVV

SEQ ID NO: 165377 - protein, 9 aa, Homo Sapiens
KSFLGVKEL

SEQ ID NO: 165378 - protein, 9 aa, Homo Sapiens
KSFNIPLLV

SEQ ID NO: 165379 - protein, 9 aa, Homo Sapiens
KSFQEILQI

SEQ ID NO: 165380 - protein, 9 aa, Homo Sapiens
KSFSFVRVI

SEQ ID NO: 165381 - protein, 9 aa, Homo Sapiens
KSFSHWSKL

SEQ ID NO: 165382 - protein, 9 aa, Homo Sapiens
KSFWGPLEL

SEQ ID NO: 165383 - protein, 9 aa, Homo Sapiens
KSFYDARLL

SEQ ID NO: 165384 - protein, 9 aa, Homo Sapiens
KSGEQILRL

SEQ ID NO: 165385 - protein, 9 aa, Homo Sapiens
KSGVPVLAV

SEQ ID NO: 165386 - protein, 9 aa, Homo Sapiens
KSIAEELEL

SEQ ID NO: 165387 - protein, 9 aa, Homo Sapiens
KSIARVLTV

SEQ ID NO: 165388 - protein, 9 aa, Homo Sapiens
KSIDRVLDI

SEQ ID NO: 165389 - protein, 9 aa, Homo Sapiens
KSIDTFFGV

SEQ ID NO: 165390 - protein, 9 aa, Homo Sapiens
KSIFVFTHV

SEQ ID NO: 165391 - protein, 9 aa, Homo Sapiens
KSIGLWNYI

SEQ ID NO: 165392 - protein, 9 aa, Homo Sapiens
KSIGSPVKV

SEQ ID NO: 165393 - protein, 9 aa, Homo Sapiens
KSIHIVVTM

SEQ ID NO: 165394 - protein, 9 aa, Homo Sapiens
KSIIKATNL

SEQ ID NO: 165395 - protein, 9 aa, Homo Sapiens
KSIILPKSL

SEQ ID NO: 165396 - protein, 9 aa, Homo Sapiens
KSIKIVKKL

SEQ ID NO: 165397 - protein, 9 aa, Homo Sapiens
KSIKNIQKI

SEQ ID NO: 165398 - protein, 9 aa, Homo Sapiens
KSIKNVTEL

SEQ ID NO: 165399 - protein, 9 aa, Homo Sapiens
KSIPGFSSL

SEQ ID NO: 165400 - protein, 9 aa, Homo Sapiens
KSIPGLLRL

SEQ ID NO: 165401 - protein, 9 aa, Homo Sapiens
KSIPVGTIL

SEQ ID NO: 165402 - protein, 9 aa, Homo Sapiens
KSIPVTQEL

SEQ ID NO: 165403 - protein, 9 aa, Homo Sapiens
KSISRLIVV

SEQ ID NO: 165404 - protein, 9 aa, Homo Sapiens
KSIVPVTKL

SEQ ID NO: 165405 - protein, 9 aa, Homo Sapiens
KSIWNNRWL

SEQ ID NO: 165406 - protein, 9 aa, Homo Sapiens
KSIYAALYF

SEQ ID NO: 165407 - protein, 9 aa, Homo Sapiens
KSIYPTLEI

SEQ ID NO: 165408 - protein, 9 aa, Homo Sapiens
KSIYTPLEL

SEQ ID NO: 165409 - protein, 9 aa, Homo Sapiens
KSKGWVNTL

SEQ ID NO: 165410 - protein, 9 aa, Homo Sapiens
KSLDIYSFI

SEQ ID NO: 165411 - protein, 9 aa, Homo Sapiens
KSLDWQIDV

SEQ ID NO: 165412 - protein, 9 aa, Homo Sapiens
KSLEVHLQV

SEQ ID NO: 165413 - protein, 9 aa, Homo Sapiens
KSLFLGQKL

SEQ ID NO: 165414 - protein, 9 aa, Homo Sapiens
KSLGSLPKV

SEQ ID NO: 165415 - protein, 9 aa, Homo Sapiens
KSLHQLLEV

SEQ ID NO: 165416 - protein, 9 aa, Homo Sapiens
KSLLFVNTL

SEQ ID NO: 165417 - protein, 9 aa, Homo Sapiens
KSLNFNMSV

SEQ ID NO: 165418 - protein, 9 aa, Homo Sapiens
KSLNISTKV

SEQ ID NO: 165419 - protein, 9 aa, Homo Sapiens
KSLPLPSSV

SEQ ID NO: 165420 - protein, 9 aa, Homo Sapiens
KSLQMIRQL

SEQ ID NO: 165421 - protein, 9 aa, Homo Sapiens
KSLQVRLEL

SEQ ID NO: 165422 - protein, 9 aa, Homo Sapiens
KSLSVVTEV

SEQ ID NO: 165423 - protein, 9 aa, Homo Sapiens
KSLTKLLIM

SEQ ID NO: 165424 - protein, 9 aa, Homo Sapiens
KSMDAIRSL

SEQ ID NO: 165425 - protein, 9 aa, Homo Sapiens
KSMEIEVLV

SEQ ID NO: 165426 - protein, 9 aa, Homo Sapiens
KSMESFLKV

SEQ ID NO: 165427 - protein, 9 aa, Homo Sapiens
KSMLEFQEL

SEQ ID NO: 165428 - protein, 9 aa, Homo Sapiens
KSMNHMNYL

SEQ ID NO: 165429 - protein, 9 aa, Homo Sapiens
KSMPTVTQI

SEQ ID NO: 165430 - protein, 9 aa, Homo Sapiens
KSNELWTEI

SEQ ID NO: 165431 - protein, 9 aa, Homo Sapiens
KSNFKPSLL

SEQ ID NO: 165432 - protein, 9 aa, Homo Sapiens
KSNGTIIHV

SEQ ID NO: 165433 - protein, 9 aa, Homo Sapiens
KSNNIMILV

SEQ ID NO: 165434 - protein, 9 aa, Homo Sapiens
KSNPIIRTV

SEQ ID NO: 165435 - protein, 9 aa, Homo Sapiens
KSNPKPLVL

SEQ ID NO: 165436 - protein, 9 aa, Homo Sapiens
KSNPYFEFV

SEQ ID NO: 165437 - protein, 9 aa, Homo Sapiens
KSNQIPTEV

SEQ ID NO: 165438 - protein, 9 aa, Homo Sapiens
KSNYKMMFV

SEQ ID NO: 165439 - protein, 9 aa, Homo Sapiens
KSQDIYLRL

SEQ ID NO: 165440 - protein, 9 aa, Homo Sapiens
KSQDNVIKV

SEQ ID NO: 165441 - protein, 9 aa, Homo Sapiens
KSQEIFLNL

SEQ ID NO: 165442 - protein, 9 aa, Homo Sapiens
KSQEQVHLL

SEQ ID NO: 165443 - protein, 9 aa, Homo Sapiens
KSQVPHIVV

SEQ ID NO: 165444 - protein, 9 aa, Homo Sapiens
KSSDFPLSV

SEQ ID NO: 165445 - protein, 9 aa, Homo Sapiens
KSSDLLKHL

SEQ ID NO: 165446 - protein, 9 aa, Homo Sapiens
KSSDQPLTV

SEQ ID NO: 165447 - protein, 9 aa, Homo Sapiens
KSSLKTLFI

SEQ ID NO: 165448 - protein, 9 aa, Homo Sapiens
KSSPLLVYL

SEQ ID NO: 165449 - protein, 9 aa, Homo Sapiens
KSSQLVTHL

SEQ ID NO: 165450 - protein, 9 aa, Homo Sapiens
KSSVKAVIL

SEQ ID NO: 165451 - protein, 9 aa, Homo Sapiens
KSTAISLFY

SEQ ID NO: 165452 - protein, 9 aa, Homo Sapiens
KSTEMALRV

SEQ ID NO: 165453 - protein, 9 aa, Homo Sapiens
KSTKVITFI

SEQ ID NO: 165454 - protein, 9 aa, Homo Sapiens
KSTPVTVVL

SEQ ID NO: 165455 - protein, 9 aa, Homo Sapiens
KSTSNITKL

SEQ ID NO: 165456 - protein, 9 aa, Homo Sapiens
KSVARIAKL

SEQ ID NO: 165457 - protein, 9 aa, Homo Sapiens
KSVDWLLVF

SEQ ID NO: 165458 - protein, 9 aa, Homo Sapiens
KSVESFLKV

SEQ ID NO: 165459 - protein, 9 aa, Homo Sapiens
KSVGKGLQV

SEQ ID NO: 165460 - protein, 9 aa, Homo Sapiens
KSVVRALFI

SEQ ID NO: 165461 - protein, 9 aa, Homo Sapiens
KSVYWENTL

SEQ ID NO: 165462 - protein, 9 aa, Homo Sapiens
KSWADVVKL

SEQ ID NO: 165463 - protein, 9 aa, Homo Sapiens
KSWVFGVHF

SEQ ID NO: 165464 - protein, 9 aa, Homo Sapiens
KSYAGEKIL

SEQ ID NO: 165465 - protein, 9 aa, Homo Sapiens
KSYEAKLRL

SEQ ID NO: 165466 - protein, 9 aa, Homo Sapiens
KSYGERLQL

SEQ ID NO: 165467 - protein, 9 aa, Homo Sapiens
KSYKGRQII

SEQ ID NO: 165468 - protein, 9 aa, Homo Sapiens
KSYPETHII

SEQ ID NO: 165469 - protein, 9 aa, Homo Sapiens
KSYPLVHVV

SEQ ID NO: 165470 - protein, 9 aa, Homo Sapiens
KSYSFIARM

SEQ ID NO: 165471 - protein, 9 aa, Homo Sapiens
KSYSKAFTL

SEQ ID NO: 165472 - protein, 9 aa, Homo Sapiens
KSYVKLRHL

SEQ ID NO: 165473 - protein, 9 aa, Homo Sapiens
KSYYDILGV

SEQ ID NO: 165474 - protein, 9 aa, Homo Sapiens
KSYYHVYKL

SEQ ID NO: 165475 - protein, 9 aa, Homo Sapiens
KSYYTVRQL

SEQ ID NO: 165476 - protein, 9 aa, Homo Sapiens
KTAEFLSKL

SEQ ID NO: 165477 - protein, 9 aa, Homo Sapiens
KTAEGFLFV

SEQ ID NO: 165478 - protein, 9 aa, Homo Sapiens
KTAENFRAL

SEQ ID NO: 165479 - protein, 9 aa, Homo Sapiens
KTAFYSFYL

SEQ ID NO: 165480 - protein, 9 aa, Homo Sapiens
KTALKLLLV

SEQ ID NO: 165481 - protein, 9 aa, Homo Sapiens
KTASIELRV

SEQ ID NO: 165482 - protein, 9 aa, Homo Sapiens
KTDQFPLFL

SEQ ID NO: 165483 - protein, 9 aa, Homo Sapiens
KTDWHRYNL

SEQ ID NO: 165484 - protein, 9 aa, Homo Sapiens
KTDYFFLEV

SEQ ID NO: 165485 - protein, 9 aa, Homo Sapiens
KTEETLRFL

SEQ ID NO: 165486 - protein, 9 aa, Homo Sapiens
KTFDAPPAL

SEQ ID NO: 165487 - protein, 9 aa, Homo Sapiens
KTFFHQENV

SEQ ID NO: 165488 - protein, 9 aa, Homo Sapiens
KTFKRILVL

SEQ ID NO: 165489 - protein, 9 aa, Homo Sapiens
KTFLFSATM

SEQ ID NO: 165490 - protein, 9 aa, Homo Sapiens
KTFNLPLLM

SEQ ID NO: 165491 - protein, 9 aa, Homo Sapiens
KTFNYPLDL

SEQ ID NO: 165492 - protein, 9 aa, Homo Sapiens
KTFSYPLDL

SEQ ID NO: 165493 - protein, 9 aa, Homo Sapiens
KTFVMGLIL

SEQ ID NO: 165494 - protein, 9 aa, Homo Sapiens
KTFYHKSLL

SEQ ID NO: 165495 - protein, 9 aa, Homo Sapiens
KTGIPLNVL

SEQ ID NO: 165496 - protein, 9 aa, Homo Sapiens
KTIDAMKRV

SEQ ID NO: 165497 - protein, 9 aa, Homo Sapiens
KTIDGILLL

SEQ ID NO: 165498 - protein, 9 aa, Homo Sapiens
KTIDKILKC

SEQ ID NO: 165499 - protein, 9 aa, Homo Sapiens
KTIDYIQFL

SEQ ID NO: 165500 - protein, 9 aa, Homo Sapiens
KTIENFLVV

SEQ ID NO: 165501 - protein, 9 aa, Homo Sapiens
KTIEWAEEI

SEQ ID NO: 165502 - protein, 9 aa, Homo Sapiens
KTIKLWNTL

SEQ ID NO: 165503 - protein, 9 aa, Homo Sapiens
KTISVVLQL

SEQ ID NO: 165504 - protein, 9 aa, Homo Sapiens
KTITQVKKI

SEQ ID NO: 165505 - protein, 9 aa, Homo Sapiens
KTKWGTIEV

SEQ ID NO: 165506 - protein, 9 aa, Homo Sapiens
KTLARALGL

SEQ ID NO: 165507 - protein, 9 aa, Homo Sapiens
KTLDMIKKI

SEQ ID NO: 165508 - protein, 9 aa, Homo Sapiens
KTLDNVAIV

SEQ ID NO: 165509 - protein, 9 aa, Homo Sapiens
KTLDQIRTI

SEQ ID NO: 165510 - protein, 9 aa, Homo Sapiens
KTLEGEFSV

SEQ ID NO: 165511 - protein, 9 aa, Homo Sapiens
KTLEQALQL

SEQ ID NO: 165512 - protein, 9 aa, Homo Sapiens
KTLERIKAI

SEQ ID NO: 165513 - protein, 9 aa, Homo Sapiens
KTLERSYLL

SEQ ID NO: 165514 - protein, 9 aa, Homo Sapiens
KTLFLAVQV

SEQ ID NO: 165515 - protein, 9 aa, Homo Sapiens
KTLLFFTAL

SEQ ID NO: 165516 - protein, 9 aa, Homo Sapiens
KTLLFVRLL

SEQ ID NO: 165517 - protein, 9 aa, Homo Sapiens
KTLLLLSSV

SEQ ID NO: 165518 - protein, 9 aa, Homo Sapiens
KTLPSMLIL

SEQ ID NO: 165519 - protein, 9 aa, Homo Sapiens
KTLPVAFKV

SEQ ID NO: 165520 - protein, 9 aa, Homo Sapiens
KTLSAILRI

SEQ ID NO: 165521 - protein, 9 aa, Homo Sapiens
KTLVLILVV

SEQ ID NO: 165522 - protein, 9 aa, Homo Sapiens
KTMNMIQKL

SEQ ID NO: 165523 - protein, 9 aa, Homo Sapiens
KTMTDTYLL

SEQ ID NO: 165524 - protein, 9 aa, Homo Sapiens
KTNAIPLTL

SEQ ID NO: 165525 - protein, 9 aa, Homo Sapiens
KTNDQMVVV

SEQ ID NO: 165526 - protein, 9 aa, Homo Sapiens
KTNEKLYTV

SEQ ID NO: 165527 - protein, 9 aa, Homo Sapiens
KTNEMLLNF

SEQ ID NO: 165528 - protein, 9 aa, Homo Sapiens
KTNFFEKRV

SEQ ID NO: 165529 - protein, 9 aa, Homo Sapiens
KTNHVFFLL

SEQ ID NO: 165530 - protein, 9 aa, Homo Sapiens
KTNIAMLTV

SEQ ID NO: 165531 - protein, 9 aa, Homo Sapiens
KTNILLRYL

SEQ ID NO: 165532 - protein, 9 aa, Homo Sapiens
KTNPEVMVV

SEQ ID NO: 165533 - protein, 9 aa, Homo Sapiens
KTNVKFLAI

SEQ ID NO: 165534 - protein, 9 aa, Homo Sapiens
KTPNFSTLL

SEQ ID NO: 165535 - protein, 9 aa, Homo Sapiens
KTQAILLEM

SEQ ID NO: 165536 - protein, 9 aa, Homo Sapiens
KTQDLFRRV

SEQ ID NO: 165537 - protein, 9 aa, Homo Sapiens
KTRLINQVL

SEQ ID NO: 165538 - protein, 9 aa, Homo Sapiens
KTRPLIPEM

SEQ ID NO: 165539 - protein, 9 aa, Homo Sapiens
KTRQIISTI

SEQ ID NO: 165540 - protein, 9 aa, Homo Sapiens
KTSDFLKVL

SEQ ID NO: 165541 - protein, 9 aa, Homo Sapiens
KTSFRIIFL

SEQ ID NO: 165542 - protein, 9 aa, Homo Sapiens
KTSGKIRLL

SEQ ID NO: 165543 - protein, 9 aa, Homo Sapiens
KTSPKALVI

SEQ ID NO: 165544 - protein, 9 aa, Homo Sapiens
KTSSFIRHV

SEQ ID NO: 165545 - protein, 9 aa, Homo Sapiens
KTSTQKFFL

SEQ ID NO: 165546 - protein, 9 aa, Homo Sapiens
KTSVVFHQL

SEQ ID NO: 165547 - protein, 9 aa, Homo Sapiens
KTSVVGLFL

SEQ ID NO: 165548 - protein, 9 aa, Homo Sapiens
KTTLALHHL

SEQ ID NO: 165549 - protein, 9 aa, Homo Sapiens
KTTPDVIFV

SEQ ID NO: 165550 - protein, 9 aa, Homo Sapiens
KTTTIAVEV

SEQ ID NO: 165551 - protein, 9 aa, Homo Sapiens
KTVDVLLKL

SEQ ID NO: 165552 - protein, 9 aa, Homo Sapiens
KTVEQHLRL

SEQ ID NO: 165553 - protein, 9 aa, Homo Sapiens
KTVLIILEV

SEQ ID NO: 165554 - protein, 9 aa, Homo Sapiens
KTVLVFLNL

SEQ ID NO: 165555 - protein, 9 aa, Homo Sapiens
KTVNKILQI

SEQ ID NO: 165556 - protein, 9 aa, Homo Sapiens
KTVNKITVV

SEQ ID NO: 165557 - protein, 9 aa, Homo Sapiens
KTVPLLSKV

SEQ ID NO: 165558 - protein, 9 aa, Homo Sapiens
KTVQFVLQF

SEQ ID NO: 165559 - protein, 9 aa, Homo Sapiens
KTVSFHLYI

SEQ ID NO: 165560 - protein, 9 aa, Homo Sapiens
KTVSVALVL

SEQ ID NO: 165561 - protein, 9 aa, Homo Sapiens
KTWDKVAVL

SEQ ID NO: 165562 - protein, 9 aa, Homo Sapiens
KTYDKTVAL

SEQ ID NO: 165563 - protein, 9 aa, Homo Sapiens
KTYDYLFKL

SEQ ID NO: 165564 - protein, 9 aa, Homo Sapiens
KTYFSGNYF

SEQ ID NO: 165565 - protein, 9 aa, Homo Sapiens
KTYGNVLVL

SEQ ID NO: 165566 - protein, 9 aa, Homo Sapiens
KTYLQQIGV

SEQ ID NO: 165567 - protein, 9 aa, Homo Sapiens
KTYNILRNV

SEQ ID NO: 165568 - protein, 9 aa, Homo Sapiens
KTYPAHAFL

SEQ ID NO: 165569 - protein, 9 aa, Homo Sapiens
KTYQFLNDI

SEQ ID NO: 165570 - protein, 9 aa, Homo Sapiens
KTYSFLTAV

SEQ ID NO: 165571 - protein, 9 aa, Homo Sapiens
KVADGFKVV

SEQ ID NO: 165572 - protein, 9 aa, Homo Sapiens
KVADLVLML

SEQ ID NO: 165573 - protein, 9 aa, Homo Sapiens
KVADTILFL

SEQ ID NO: 165574 - protein, 9 aa, Homo Sapiens
KVARAILYV

SEQ ID NO: 165575 - protein, 9 aa, Homo Sapiens
KVFDAFLNM

SEQ ID NO: 165576 - protein, 9 aa, Homo Sapiens
KVFERQLQL

SEQ ID NO: 165577 - protein, 9 aa, Homo Sapiens
KVFGGFQVV

SEQ ID NO: 165578 - protein, 9 aa, Homo Sapiens
KVFKDFSEL

SEQ ID NO: 165579 - protein, 9 aa, Homo Sapiens
KVFLHEATV

SEQ ID NO: 165580 - protein, 9 aa, Homo Sapiens
KVFNRYLEV

SEQ ID NO: 165581 - protein, 9 aa, Homo Sapiens
KVFSAFITV

SEQ ID NO: 165582 - protein, 9 aa, Homo Sapiens
KVIDTQQKV

SEQ ID NO: 165583 - protein, 9 aa, Homo Sapiens
KVIEINPYL

SEQ ID NO: 165584 - protein, 9 aa, Homo Sapiens
KVIVRFLTV

SEQ ID NO: 165585 - protein, 9 aa, Homo Sapiens
KVIYVLPML

SEQ ID NO: 165586 - protein, 9 aa, Homo Sapiens
KVLDFEHFL

SEQ ID NO: 165587 - protein, 9 aa, Homo Sapiens
KVLDKPSRL

SEQ ID NO: 165588 - protein, 9 aa, Homo Sapiens
KVLELQTEL

SEQ ID NO: 165589 - protein, 9 aa, Homo Sapiens
KVLGALLFV

SEQ ID NO: 165590 - protein, 9 aa, Homo Sapiens
KVLNWFSEL

SEQ ID NO: 165591 - protein, 9 aa, Homo Sapiens
KVMELLVHL

SEQ ID NO: 165592 - protein, 9 aa, Homo Sapiens
KVMGFGLYL

SEQ ID NO: 165593 - protein, 9 aa, Homo Sapiens
KVNAQFLEL

SEQ ID NO: 165594 - protein, 9 aa, Homo Sapiens
KVNIIPIIA

SEQ ID NO: 165595 - protein, 9 aa, Homo Sapiens
KVNSHIAKL

SEQ ID NO: 165596 - protein, 9 aa, Homo Sapiens
KVNYIKILV

SEQ ID NO: 165597 - protein, 9 aa, Homo Sapiens
KVREEFKEL

SEQ ID NO: 165598 - protein, 9 aa, Homo Sapiens
KVSDILLRL

SEQ ID NO: 165599 - protein, 9 aa, Homo Sapiens
KVSDSVLLL

SEQ ID NO: 165600 - protein, 9 aa, Homo Sapiens
KVSDYEMKL

SEQ ID NO: 165601 - protein, 9 aa, Homo Sapiens
KVSERYLTM

SEQ ID NO: 165602 - protein, 9 aa, Homo Sapiens
KVSHHQLIL

SEQ ID NO: 165603 - protein, 9 aa, Homo Sapiens
KVSTQGLFV

SEQ ID NO: 165604 - protein, 9 aa, Homo Sapiens
KVTEFFLLI

SEQ ID NO: 165605 - protein, 9 aa, Homo Sapiens
KVTEVFILV

SEQ ID NO: 165606 - protein, 9 aa, Homo Sapiens
KVVALVHAV

SEQ ID NO: 165607 - protein, 9 aa, Homo Sapiens
KVVEHGLFV

SEQ ID NO: 165608 - protein, 9 aa, Homo Sapiens
KVVEIVKKL

SEQ ID NO: 165609 - protein, 9 aa, Homo Sapiens
KVVELFFYL

SEQ ID NO: 165610 - protein, 9 aa, Homo Sapiens
LAAHIPLFL

SEQ ID NO: 165611 - protein, 9 aa, Homo Sapiens
LAIRIPLLI

SEQ ID NO: 165612 - protein, 9 aa, Homo Sapiens
LALLHLLYL

SEQ ID NO: 165613 - protein, 9 aa, Homo Sapiens
LANEVKVLL

SEQ ID NO: 165614 - protein, 9 aa, Homo Sapiens
LANPHELSL

SEQ ID NO: 165615 - protein, 9 aa, Homo Sapiens
LANRFQLQL

SEQ ID NO: 165616 - protein, 9 aa, Homo Sapiens
LASAFFLVV

SEQ ID NO: 165617 - protein, 9 aa, Homo Sapiens
LATSHMLEL

SEQ ID NO: 165618 - protein, 9 aa, Homo Sapiens
LDTNADKQL

SEQ ID NO: 165619 - protein, 9 aa, Homo Sapiens
LGIAAPNLA

SEQ ID NO: 165620 - protein, 9 aa, Homo Sapiens
LGNIARLEL

SEQ ID NO: 165621 - protein, 9 aa, Homo Sapiens
LGNPKILLL

SEQ ID NO: 165622 - protein, 9 aa, Homo Sapiens
LGSQAHLTV

SEQ ID NO: 165623 - protein, 9 aa, Homo Sapiens
LGTDSHLVV

SEQ ID NO: 165624 - protein, 9 aa, Homo Sapiens
LGYSVYRTV

SEQ ID NO: 165625 - protein, 9 aa, Homo Sapiens
LIGPPLLIP

SEQ ID NO: 165626 - protein, 9 aa, Homo Sapiens
LINALVLYV

SEQ ID NO: 165627 - protein, 9 aa, Homo Sapiens
LINANMMVL

SEQ ID NO: 165628 - protein, 9 aa, Homo Sapiens
LIQERQLFL

SEQ ID NO: 165629 - protein, 9 aa, Homo Sapiens
LISESFLTV

SEQ ID NO: 165630 - protein, 9 aa, Homo Sapiens
LIYGRPVYV

SEQ ID NO: 165631 - protein, 9 aa, Homo Sapiens
LIYSGKLLL

SEQ ID NO: 165632 - protein, 9 aa, Homo Sapiens
LLIPIHLEV

SEQ ID NO: 165633 - protein, 9 aa, Homo Sapiens
LLNDHIYVV

SEQ ID NO: 165634 - protein, 9 aa, Homo Sapiens
LLNDRKVFV

SEQ ID NO: 165635 - protein, 9 aa, Homo Sapiens
LLNKSIIRV

SEQ ID NO: 165636 - protein, 9 aa, Homo Sapiens
LLNPHALVI

SEQ ID NO: 165637 - protein, 9 aa, Homo Sapiens
LLNRHLLAV

SEQ ID NO: 165638 - protein, 9 aa, Homo Sapiens
LLNSNIPLE

SEQ ID NO: 165639 - protein, 9 aa, Homo Sapiens
LLRAFILKI

SEQ ID NO: 165640 - protein, 9 aa, Homo Sapiens
LMNNHQLEL

SEQ ID NO: 165641 - protein, 9 aa, Homo Sapiens
LNMQFVVRV

SEQ ID NO: 165642 - protein, 9 aa, Homo Sapiens
LPFDRFSEV

SEQ ID NO: 165643 - protein, 9 aa, Homo Sapiens
LPINGNGKQ

SEQ ID NO: 165644 - protein, 9 aa, Homo Sapiens
LQNADPLKV

SEQ ID NO: 165645 - protein, 9 aa, Homo Sapiens
LQNEYALSL

SEQ ID NO: 165646 - protein, 9 aa, Homo Sapiens
LQNNTILRL

SEQ ID NO: 165647 - protein, 9 aa, Homo Sapiens
LQNQRVLYV

SEQ ID NO: 165648 - protein, 9 aa, Homo Sapiens
LQYPDFSVV

SEQ ID NO: 165649 - protein, 9 aa, Homo Sapiens
LRLSYPLEL

SEQ ID NO: 165650 - protein, 9 aa, Homo Sapiens
LSAGRVVVV

SEQ ID NO: 165651 - protein, 9 aa, Homo Sapiens
LSAPIHTQM

SEQ ID NO: 165652 - protein, 9 aa, Homo Sapiens
LSAQQILHV

SEQ ID NO: 165653 - protein, 9 aa, Homo Sapiens
LSDDHVLIL

SEQ ID NO: 165654 - protein, 9 aa, Homo Sapiens
LSDETLLEI

SEQ ID NO: 165655 - protein, 9 aa, Homo Sapiens
LSDIHTRFL

SEQ ID NO: 165656 - protein, 9 aa, Homo Sapiens
LSDLALHFL

SEQ ID NO: 165657 - protein, 9 aa, Homo Sapiens
LSDLHAHKL

SEQ ID NO: 165658 - protein, 9 aa, Homo Sapiens
LSDPQVHTV

SEQ ID NO: 165659 - protein, 9 aa, Homo Sapiens
LSEHNVLVV

SEQ ID NO: 165660 - protein, 9 aa, Homo Sapiens
LSHAGILKV

SEQ ID NO: 165661 - protein, 9 aa, Homo Sapiens
LSHDQLLEV

SEQ ID NO: 165662 - protein, 9 aa, Homo Sapiens
LSHSLLVTL

SEQ ID NO: 165663 - protein, 9 aa, Homo Sapiens
LSIDHPQKV

SEQ ID NO: 165664 - protein, 9 aa, Homo Sapiens
LSIEIGHEV

SEQ ID NO: 165665 - protein, 9 aa, Homo Sapiens
LSIPRVFYV

SEQ ID NO: 165666 - protein, 9 aa, Homo Sapiens
LSIPYRLIF

SEQ ID NO: 165667 - protein, 9 aa, Homo Sapiens
LSIRHLMEL

SEQ ID NO: 165668 - protein, 9 aa, Homo Sapiens
LSIRSVRLV

SEQ ID NO: 165669 - protein, 9 aa, Homo Sapiens
LSISKQTRL

SEQ ID NO: 165670 - protein, 9 aa, Homo Sapiens
LSKGPGLEV

SEQ ID NO: 165671 - protein, 9 aa, Homo Sapiens
LSLKLIQQL

SEQ ID NO: 165672 - protein, 9 aa, Homo Sapiens
LSMKTLLEL

SEQ ID NO: 165673 - protein, 9 aa, Homo Sapiens
LSNAKHLEI

SEQ ID NO: 165674 - protein, 9 aa, Homo Sapiens
LSNDLKLNL

SEQ ID NO: 165675 - protein, 9 aa, Homo Sapiens
LSNEKLPNL

SEQ ID NO: 165676 - protein, 9 aa, Homo Sapiens
LSNGQKVLV

SEQ ID NO: 165677 - protein, 9 aa, Homo Sapiens
LSNKHELQL

SEQ ID NO: 165678 - protein, 9 aa, Homo Sapiens
LSNLHQLQM

SEQ ID NO: 165679 - protein, 9 aa, Homo Sapiens
LSNMKILTL

SEQ ID NO: 165680 - protein, 9 aa, Homo Sapiens
LSNPDPRLL

SEQ ID NO: 165681 - protein, 9 aa, Homo Sapiens
LSNPKLLQM

SEQ ID NO: 165682 - protein, 9 aa, Homo Sapiens
LSNSHLVLI

SEQ ID NO: 165683 - protein, 9 aa, Homo Sapiens
LSNWYHFLV

SEQ ID NO: 165684 - protein, 9 aa, Homo Sapiens
LSQGQVLKL

SEQ ID NO: 165685 - protein, 9 aa, Homo Sapiens
LSQPQMLIV

SEQ ID NO: 165686 - protein, 9 aa, Homo Sapiens
LSRLFRVFV

SEQ ID NO: 165687 - protein, 9 aa, Homo Sapiens
LSSFSNLKV

SEQ ID NO: 165688 - protein, 9 aa, Homo Sapiens
LSSLVILEV

SEQ ID NO: 165689 - protein, 9 aa, Homo Sapiens
LSSNAIREV

SEQ ID NO: 165690 - protein, 9 aa, Homo Sapiens
LSSNVILHV

SEQ ID NO: 165691 - protein, 9 aa, Homo Sapiens
LSSQVVLWV

SEQ ID NO: 165692 - protein, 9 aa, Homo Sapiens
LSSSVIREL

SEQ ID NO: 165693 - protein, 9 aa, Homo Sapiens
LSSTLEHQV

SEQ ID NO: 165694 - protein, 9 aa, Homo Sapiens
LSSWVYLRF

SEQ ID NO: 165695 - protein, 9 aa, Homo Sapiens
LSTGKYLNV

SEQ ID NO: 165696 - protein, 9 aa, Homo Sapiens
LSVEIVHEL

SEQ ID NO: 165697 - protein, 9 aa, Homo Sapiens
LSYDGRLVI

SEQ ID NO: 165698 - protein, 9 aa, Homo Sapiens
LSYLDARSL

SEQ ID NO: 165699 - protein, 9 aa, Homo Sapiens
LSYNLPLEL

SEQ ID NO: 165700 - protein, 9 aa, Homo Sapiens
LSYSEILRL

SEQ ID NO: 165701 - protein, 9 aa, Homo Sapiens
LSYWKPFLV

SEQ ID NO: 165702 - protein, 9 aa, Homo Sapiens
LTDPSQRLV

SEQ ID NO: 165703 - protein, 9 aa, Homo Sapiens
LTDTTILQV

SEQ ID NO: 165704 - protein, 9 aa, Homo Sapiens
LTHEVLQLI

SEQ ID NO: 165705 - protein, 9 aa, Homo Sapiens
LTIDRQQKL

SEQ ID NO: 165706 - protein, 9 aa, Homo Sapiens
LTIPGIKYV

SEQ ID NO: 165707 - protein, 9 aa, Homo Sapiens
LTLYPPDIL

SEQ ID NO: 165708 - protein, 9 aa, Homo Sapiens
LTMEVIRQV

SEQ ID NO: 165709 - protein, 9 aa, Homo Sapiens
LTNATIMVV

SEQ ID NO: 165710 - protein, 9 aa, Homo Sapiens
LTNDWEDHL

SEQ ID NO: 165711 - protein, 9 aa, Homo Sapiens
LTNPELLKV

SEQ ID NO: 165712 - protein, 9 aa, Homo Sapiens
LTNPQKLMV

SEQ ID NO: 165713 - protein, 9 aa, Homo Sapiens
LTNPRTLKI

SEQ ID NO: 165714 - protein, 9 aa, Homo Sapiens
LTSKASLIV

SEQ ID NO: 165715 - protein, 9 aa, Homo Sapiens
LTTKHLTAL

SEQ ID NO: 165716 - protein, 9 aa, Homo Sapiens
LTTLELLEV

SEQ ID NO: 165717 - protein, 9 aa, Homo Sapiens
LTTRIAHFL

SEQ ID NO: 165718 - protein, 9 aa, Homo Sapiens
LTVLHPLKV

SEQ ID NO: 165719 - protein, 9 aa, Homo Sapiens
LTYGTMVFV

SEQ ID NO: 165720 - protein, 9 aa, Homo Sapiens
LTYHGHLYL

SEQ ID NO: 165721 - protein, 9 aa, Homo Sapiens
LVIGRVLEL

SEQ ID NO: 165722 - protein, 9 aa, Homo Sapiens
LVLLLEHLL

SEQ ID NO: 165723 - protein, 9 aa, Homo Sapiens
LVNAGVVHV

SEQ ID NO: 165724 - protein, 9 aa, Homo Sapiens
LVNAIVLVL

SEQ ID NO: 165725 - protein, 9 aa, Homo Sapiens
LVNDHLLNF

SEQ ID NO: 165726 - protein, 9 aa, Homo Sapiens
LVNGKSLEL

SEQ ID NO: 165727 - protein, 9 aa, Homo Sapiens
LVNLRELYL

SEQ ID NO: 165728 - protein, 9 aa, Homo Sapiens
LVNQRLLEV

SEQ ID NO: 165729 - protein, 9 aa, Homo Sapiens
LVNSYHLLL

SEQ ID NO: 165730 - protein, 9 aa, Homo Sapiens
LVNTHRLLL

SEQ ID NO: 165731 - protein, 9 aa, Homo Sapiens
LVSQYFQTV

SEQ ID NO: 165732 - protein, 9 aa, Homo Sapiens
LVYKNFPQL

SEQ ID NO: 165733 - protein, 9 aa, Homo Sapiens
MADPNIRFL

SEQ ID NO: 165734 - protein, 9 aa, Homo Sapiens
MADVYKLLV

SEQ ID NO: 165735 - protein, 9 aa, Homo Sapiens
MANGAVIHL

SEQ ID NO: 165736 - protein, 9 aa, Homo Sapiens
MANPRELRI

SEQ ID NO: 165737 - protein, 9 aa, Homo Sapiens
MANPTALLL

SEQ ID NO: 165738 - protein, 9 aa, Homo Sapiens
MATAHVTEI

SEQ ID NO: 165739 - protein, 9 aa, Homo Sapiens
MATRAGLQV

SEQ ID NO: 165740 - protein, 9 aa, Homo Sapiens
MAYAGARFV

SEQ ID NO: 165741 - protein, 9 aa, Homo Sapiens
MGAPAGLKM

SEQ ID NO: 165742 - protein, 9 aa, Homo Sapiens
MGYERERVV

SEQ ID NO: 165743 - protein, 9 aa, Homo Sapiens
MIDNVILLI

SEQ ID NO: 165744 - protein, 9 aa, Homo Sapiens
MIFAKFDEV

SEQ ID NO: 165745 - protein, 9 aa, Homo Sapiens
MILNKALLL

SEQ ID NO: 165746 - protein, 9 aa, Homo Sapiens
MINSSVHVI

SEQ ID NO: 165747 - protein, 9 aa, Homo Sapiens
MISSHELFI

SEQ ID NO: 165748 - protein, 9 aa, Homo Sapiens
MLFGHPLLV

SEQ ID NO: 165749 - protein, 9 aa, Homo Sapiens
MLTELEKAL

SEQ ID NO: 165750 - protein, 9 aa, Homo Sapiens
MMNDSILRL

SEQ ID NO: 165751 - protein, 9 aa, Homo Sapiens
MQNPQILAA

SEQ ID NO: 165752 - protein, 9 aa, Homo Sapiens
MQNPRQYKI

SEQ ID NO: 165753 - protein, 9 aa, Homo Sapiens
MSADVPLVV

SEQ ID NO: 165754 - protein, 9 aa, Homo Sapiens
MSFGNVVEL

SEQ ID NO: 165755 - protein, 9 aa, Homo Sapiens
MSLKWMSVF

SEQ ID NO: 165756 - protein, 9 aa, Homo Sapiens
MSNALAIQV

SEQ ID NO: 165757 - protein, 9 aa, Homo Sapiens
MSNSTIVRL

SEQ ID NO: 165758 - protein, 9 aa, Homo Sapiens
MSQYLELKL

SEQ ID NO: 165759 - protein, 9 aa, Homo Sapiens
MSSDVFPLL

SEQ ID NO: 165760 - protein, 9 aa, Homo Sapiens
MSSPLSKEL

SEQ ID NO: 165761 - protein, 9 aa, Homo Sapiens
MSSSVVVRL

SEQ ID NO: 165762 - protein, 9 aa, Homo Sapiens
MSTSKVTVL

SEQ ID NO: 165763 - protein, 9 aa, Homo Sapiens
MSVDRYIAV

SEQ ID NO: 165764 - protein, 9 aa, Homo Sapiens
MSVDRYLAI

SEQ ID NO: 165765 - protein, 9 aa, Homo Sapiens
MSVDRYLSI

SEQ ID NO: 165766 - protein, 9 aa, Homo Sapiens
MSVPLVHQV

SEQ ID NO: 165767 - protein, 9 aa, Homo Sapiens
MSYAEVMRL

SEQ ID NO: 165768 - protein, 9 aa, Homo Sapiens
MSYEQLMQL

SEQ ID NO: 165769 - protein, 9 aa, Homo Sapiens
MSYPAKVTL

SEQ ID NO: 165770 - protein, 9 aa, Homo Sapiens
MSYYFLHVV

SEQ ID NO: 165771 - protein, 9 aa, Homo Sapiens
MSYYRFGEM

SEQ ID NO: 165772 - protein, 9 aa, Homo Sapiens
MTDPIRILV

SEQ ID NO: 165773 - protein, 9 aa, Homo Sapiens
MTISVEKKV

SEQ ID NO: 165774 - protein, 9 aa, Homo Sapiens
MTNLQELHL

SEQ ID NO: 165775 - protein, 9 aa, Homo Sapiens
MTVQILLKL

SEQ ID NO: 165776 - protein, 9 aa, Homo Sapiens
MTYERILYI

SEQ ID NO: 165777 - protein, 9 aa, Homo Sapiens
MVATWMLEV

SEQ ID NO: 165778 - protein, 9 aa, Homo Sapiens
MVDGTLLLL

SEQ ID NO: 165779 - protein, 9 aa, Homo Sapiens
MVNEFKLEL

SEQ ID NO: 165780 - protein, 9 aa, Homo Sapiens
MVNSKILLL

SEQ ID NO: 165781 - protein, 9 aa, Homo Sapiens
MVVDIVQEL

SEQ ID NO: 165782 - protein, 9 aa, Homo Sapiens
NALGVILQV

SEQ ID NO: 165783 - protein, 9 aa, Homo Sapiens
NNGIPPVQV

SEQ ID NO: 165784 - protein, 9 aa, Homo Sapiens
NNIPIIASV

SEQ ID NO: 165785 - protein, 9 aa, Homo Sapiens
NNNIPPVEF

SEQ ID NO: 165786 - protein, 9 aa, Homo Sapiens
NNQIKELFI

SEQ ID NO: 165787 - protein, 9 aa, Homo Sapiens
NQFPGFKEV

SEQ ID NO: 165788 - protein, 9 aa, Homo Sapiens
NQTPVTLQV

SEQ ID NO: 165789 - protein, 9 aa, Homo Sapiens
NSFGFPQYV

SEQ ID NO: 165790 - protein, 9 aa, Homo Sapiens
NSFKGIKYL

SEQ ID NO: 165791 - protein, 9 aa, Homo Sapiens
NSGINVMQV

SEQ ID NO: 165792 - protein, 9 aa, Homo Sapiens
NSGNVNLTL

SEQ ID NO: 165793 - protein, 9 aa, Homo Sapiens
NSISKLTQL

SEQ ID NO: 165794 - protein, 9 aa, Homo Sapiens
NSNAVPLKL

SEQ ID NO: 165795 - protein, 9 aa, Homo Sapiens
NSNPFEVKV

SEQ ID NO: 165796 - protein, 9 aa, Homo Sapiens
NSNTQVVLL

SEQ ID NO: 165797 - protein, 9 aa, Homo Sapiens
NSSDIFLLV

SEQ ID NO: 165798 - protein, 9 aa, Homo Sapiens
NSTDLPLNI

SEQ ID NO: 165799 - protein, 9 aa, Homo Sapiens
NSTGVLLEV

SEQ ID NO: 165800 - protein, 9 aa, Homo Sapiens
NTSKIWLIV

SEQ ID NO: 165801 - protein, 9 aa, Homo Sapiens
NVLDHFSEL

SEQ ID NO: 165802 - protein, 9 aa, Homo Sapiens
NVNENFLLV

SEQ ID NO: 165803 - protein, 9 aa, Homo Sapiens
PSMGHPLEV

SEQ ID NO: 165804 - protein, 9 aa, Homo Sapiens
PSSDIYLVV

SEQ ID NO: 165805 - protein, 9 aa, Homo Sapiens
PSVPVFLEV

SEQ ID NO: 165806 - protein, 9 aa, Homo Sapiens
QAADFALKV

SEQ ID NO: 165807 - protein, 9 aa, Homo Sapiens
QADVAVLVV

SEQ ID NO: 165808 - protein, 9 aa, Homo Sapiens
QAIERYLVV

SEQ ID NO: 165809 - protein, 9 aa, Homo Sapiens
QALDYFLKM

SEQ ID NO: 165810 - protein, 9 aa, Homo Sapiens
QANRHMSLL

SEQ ID NO: 165811 - protein, 9 aa, Homo Sapiens
QAQYHSLKL

SEQ ID NO: 165812 - protein, 9 aa, Homo Sapiens
QASHQPLYL

SEQ ID NO: 165813 - protein, 9 aa, Homo Sapiens
QAYPEVRIV

SEQ ID NO: 165814 - protein, 9 aa, Homo Sapiens
QGAHIVLEV

SEQ ID NO: 165815 - protein, 9 aa, Homo Sapiens
QGNDIVVKV

SEQ ID NO: 165816 - protein, 9 aa, Homo Sapiens
QIFSKFGTV

SEQ ID NO: 165817 - protein, 9 aa, Homo Sapiens
QIIQTYLTV

SEQ ID NO: 165818 - protein, 9 aa, Homo Sapiens
QILQKTREV

SEQ ID NO: 165819 - protein, 9 aa, Homo Sapiens
QISPFFPLV

SEQ ID NO: 165820 - protein, 9 aa, Homo Sapiens
QITEKQLQV

SEQ ID NO: 165821 - protein, 9 aa, Homo Sapiens
QNAIQPLFV

SEQ ID NO: 165822 - protein, 9 aa, Homo Sapiens
QNLSIIQYL

SEQ ID NO: 165823 - protein, 9 aa, Homo Sapiens
QNNMVILKL

SEQ ID NO: 165824 - protein, 9 aa, Homo Sapiens
QNSSVILFL

SEQ ID NO: 165825 - protein, 9 aa, Homo Sapiens
QNTEEFLRV

SEQ ID NO: 165826 - protein, 9 aa, Homo Sapiens
QNTEVVLYL

SEQ ID NO: 165827 - protein, 9 aa, Homo Sapiens
QNTPVTWLV

SEQ ID NO: 165828 - protein, 9 aa, Homo Sapiens
QPNPLPLRL

SEQ ID NO: 165829 - protein, 9 aa, Homo Sapiens
QQNGTPLKV

SEQ ID NO: 165830 - protein, 9 aa, Homo Sapiens
QQNPQPLIF

SEQ ID NO: 165831 - protein, 9 aa, Homo Sapiens
QQSIERLLV

SEQ ID NO: 165832 - protein, 9 aa, Homo Sapiens
QQTPLHLAV

SEQ ID NO: 165833 - protein, 9 aa, Homo Sapiens
QSAQHALRL

SEQ ID NO: 165834 - protein, 9 aa, Homo Sapiens
QSFFFTHLL

SEQ ID NO: 165835 - protein, 9 aa, Homo Sapiens
QSFPEPLII

SEQ ID NO: 165836 - protein, 9 aa, Homo Sapiens
QSHAYQQFL

SEQ ID NO: 165837 - protein, 9 aa, Homo Sapiens
QSIAFISRL

SEQ ID NO: 165838 - protein, 9 aa, Homo Sapiens
QSIEWPLKF

SEQ ID NO: 165839 - protein, 9 aa, Homo Sapiens
QSIGLIQHL

SEQ ID NO: 165840 - protein, 9 aa, Homo Sapiens
QSIHLEQKL

SEQ ID NO: 165841 - protein, 9 aa, Homo Sapiens
QSILKPMML

SEQ ID NO: 165842 - protein, 9 aa, Homo Sapiens
QSINKKLEL

SEQ ID NO: 165843 - protein, 9 aa, Homo Sapiens
QSIPAVLEI

SEQ ID NO: 165844 - protein, 9 aa, Homo Sapiens
QSISVAKEV

SEQ ID NO: 165845 - protein, 9 aa, Homo Sapiens
QSIVPALEI

SEQ ID NO: 165846 - protein, 9 aa, Homo Sapiens
QSLGKPLVL

SEQ ID NO: 165847 - protein, 9 aa, Homo Sapiens
QSLPHSATV

SEQ ID NO: 165848 - protein, 9 aa, Homo Sapiens
QSLQHYLEL

SEQ ID NO: 165849 - protein, 9 aa, Homo Sapiens
QSLRLFREV

SEQ ID NO: 165850 - protein, 9 aa, Homo Sapiens
QSMEQIRRI

SEQ ID NO: 165851 - protein, 9 aa, Homo Sapiens
QSMPVFKEV

SEQ ID NO: 165852 - protein, 9 aa, Homo Sapiens
QSNAVPLFL

SEQ ID NO: 165853 - protein, 9 aa, Homo Sapiens
QSNPKVMNL

SEQ ID NO: 165854 - protein, 9 aa, Homo Sapiens
QSNPLLIHV

SEQ ID NO: 165855 - protein, 9 aa, Homo Sapiens
QSQALILKI

SEQ ID NO: 165856 - protein, 9 aa, Homo Sapiens
QSSERPLFL

SEQ ID NO: 165857 - protein, 9 aa, Homo Sapiens
QSSSLTVHV

SEQ ID NO: 165858 - protein, 9 aa, Homo Sapiens
QSTDIIRYL

SEQ ID NO: 165859 - protein, 9 aa, Homo Sapiens
QSTEILKKL

SEQ ID NO: 165860 - protein, 9 aa, Homo Sapiens
QSTLSDLRV

SEQ ID NO: 165861 - protein, 9 aa, Homo Sapiens
QSTQRSLAL

SEQ ID NO: 165862 - protein, 9 aa, Homo Sapiens
QSTSDYLVV

SEQ ID NO: 165863 - protein, 9 aa, Homo Sapiens
QSTSIKLAL

SEQ ID NO: 165864 - protein, 9 aa, Homo Sapiens
QSVDLVFPV

SEQ ID NO: 165865 - protein, 9 aa, Homo Sapiens
QSVMNVLKV

SEQ ID NO: 165866 - protein, 9 aa, Homo Sapiens
QSYGNVVEL

SEQ ID NO: 165867 - protein, 9 aa, Homo Sapiens
QSYWNHREL

SEQ ID NO: 165868 - protein, 9 aa, Homo Sapiens
QTIALITYL

SEQ ID NO: 165869 - protein, 9 aa, Homo Sapiens
QTIGYQIRL

SEQ ID NO: 165870 - protein, 9 aa, Homo Sapiens
QTNLTLLQV

SEQ ID NO: 165871 - protein, 9 aa, Homo Sapiens
QTNLVKLLL

SEQ ID NO: 165872 - protein, 9 aa, Homo Sapiens
QTNSFPVLL

SEQ ID NO: 165873 - protein, 9 aa, Homo Sapiens
QTSATFLRV

SEQ ID NO: 165874 - protein, 9 aa, Homo Sapiens
QTTEHIVKL

SEQ ID NO: 165875 - protein, 9 aa, Homo Sapiens
QTVAAVLMV

SEQ ID NO: 165876 - protein, 9 aa, Homo Sapiens
QTYFFPIHL

SEQ ID NO: 165877 - protein, 9 aa, Homo Sapiens
QVLPHLLEV

SEQ ID NO: 165878 - protein, 9 aa, Homo Sapiens
QVNPVLLTL

SEQ ID NO: 165879 - protein, 9 aa, Homo Sapiens
QVNSRPMFI

SEQ ID NO: 165880 - protein, 9 aa, Homo Sapiens
RAADGFLFV

SEQ ID NO: 165881 - protein, 9 aa, Homo Sapiens
RAAERALQL

SEQ ID NO: 165882 - protein, 9 aa, Homo Sapiens
RAAMPVLKV

SEQ ID NO: 165883 - protein, 9 aa, Homo Sapiens
RAASVFIRV

SEQ ID NO: 165884 - protein, 9 aa, Homo Sapiens
RAATFPLQV

SEQ ID NO: 165885 - protein, 9 aa, Homo Sapiens
RADASIRLL

SEQ ID NO: 165886 - protein, 9 aa, Homo Sapiens
RADSVGKLV

SEQ ID NO: 165887 - protein, 9 aa, Homo Sapiens
RAFDHVLHL

SEQ ID NO: 165888 - protein, 9 aa, Homo Sapiens
RAFGFMTRV

SEQ ID NO: 165889 - protein, 9 aa, Homo Sapiens
RAFGIPIRV

SEQ ID NO: 165890 - protein, 9 aa, Homo Sapiens
RAFNFLNEI

SEQ ID NO: 165891 - protein, 9 aa, Homo Sapiens
RAGKPHLVL

SEQ ID NO: 165892 - protein, 9 aa, Homo Sapiens
RAGSIVLKV

SEQ ID NO: 165893 - protein, 9 aa, Homo Sapiens
RAHNVPLKL

SEQ ID NO: 165894 - protein, 9 aa, Homo Sapiens
RAHSEPLAL

SEQ ID NO: 165895 - protein, 9 aa, Homo Sapiens
RAIAKIKML

SEQ ID NO: 165896 - protein, 9 aa, Homo Sapiens
RAIDFSPYL

SEQ ID NO: 165897 - protein, 9 aa, Homo Sapiens
RAIDSIHQL

SEQ ID NO: 165898 - protein, 9 aa, Homo Sapiens
RAIPELTKL

SEQ ID NO: 165899 - protein, 9 aa, Homo Sapiens
RAIPFGTMV

SEQ ID NO: 165900 - protein, 9 aa, Homo Sapiens
RAIPNNQVL

SEQ ID NO: 165901 - protein, 9 aa, Homo Sapiens
RAIQFYLEF

SEQ ID NO: 165902 - protein, 9 aa, Homo Sapiens
RAITYYLDV

SEQ ID NO: 165903 - protein, 9 aa, Homo Sapiens
RALDHAMSV

SEQ ID NO: 165904 - protein, 9 aa, Homo Sapiens
RALDHYLTL

SEQ ID NO: 165905 - protein, 9 aa, Homo Sapiens
RALDTPVMV

SEQ ID NO: 165906 - protein, 9 aa, Homo Sapiens
RALDYALQI

SEQ ID NO: 165907 - protein, 9 aa, Homo Sapiens
RALEHFTDL

SEQ ID NO: 165908 - protein, 9 aa, Homo Sapiens
RALKGVLRV

SEQ ID NO: 165909 - protein, 9 aa, Homo Sapiens
RALNVFYYL

SEQ ID NO: 165910 - protein, 9 aa, Homo Sapiens
RALPHFILV

SEQ ID NO: 165911 - protein, 9 aa, Homo Sapiens
RALQFSLML

SEQ ID NO: 165912 - protein, 9 aa, Homo Sapiens
RALQQFLYV

SEQ ID NO: 165913 - protein, 9 aa, Homo Sapiens
RALVMLLEV

SEQ ID NO: 165914 - protein, 9 aa, Homo Sapiens
RAMSIAQRV

SEQ ID NO: 165915 - protein, 9 aa, Homo Sapiens
RANNLYMEL

SEQ ID NO: 165916 - protein, 9 aa, Homo Sapiens
RANTFVAEL

SEQ ID NO: 165917 - protein, 9 aa, Homo Sapiens
RANYWLKLV

SEQ ID NO: 165918 - protein, 9 aa, Homo Sapiens
RAQDRIVEV

SEQ ID NO: 165919 - protein, 9 aa, Homo Sapiens
RAQGVVLKV

SEQ ID NO: 165920 - protein, 9 aa, Homo Sapiens
RAQLHQLQL

SEQ ID NO: 165921 - protein, 9 aa, Homo Sapiens
RAQLTQLFL

SEQ ID NO: 165922 - protein, 9 aa, Homo Sapiens
RAQQEQLLL

SEQ ID NO: 165923 - protein, 9 aa, Homo Sapiens
RASEYITDV

SEQ ID NO: 165924 - protein, 9 aa, Homo Sapiens
RASFIFISV

SEQ ID NO: 165925 - protein, 9 aa, Homo Sapiens
RASGIFLRL

SEQ ID NO: 165926 - protein, 9 aa, Homo Sapiens
RATEGILFF

SEQ ID NO: 165927 - protein, 9 aa, Homo Sapiens
RATHRLLLL

SEQ ID NO: 165928 - protein, 9 aa, Homo Sapiens
RATLSTLAV

SEQ ID NO: 165929 - protein, 9 aa, Homo Sapiens
RAVDCYLKV

SEQ ID NO: 165930 - protein, 9 aa, Homo Sapiens
RAVPVGSGL

SEQ ID NO: 165931 - protein, 9 aa, Homo Sapiens
RAYDGTTYL

SEQ ID NO: 165932 - protein, 9 aa, Homo Sapiens
RAYEQALNL

SEQ ID NO: 165933 - protein, 9 aa, Homo Sapiens
RAYLFAHAV

SEQ ID NO: 165934 - protein, 9 aa, Homo Sapiens
RAYPAAITI

SEQ ID NO: 165935 - protein, 9 aa, Homo Sapiens
RAYQRQLVM

SEQ ID NO: 165936 - protein, 9 aa, Homo Sapiens
RAYSFKVVL

SEQ ID NO: 165937 - protein, 9 aa, Homo Sapiens
RAYSNLRRL

SEQ ID NO: 165938 - protein, 9 aa, Homo Sapiens
RDMGYPLAV

SEQ ID NO: 165939 - protein, 9 aa, Homo Sapiens
RGAPPLQLP

SEQ ID NO: 165940 - protein, 9 aa, Homo Sapiens
RGDPHILVV

SEQ ID NO: 165941 - protein, 9 aa, Homo Sapiens
RGFDKAYVV

SEQ ID NO: 165942 - protein, 9 aa, Homo Sapiens
RGFEFTLMV

SEQ ID NO: 165943 - protein, 9 aa, Homo Sapiens
RGFYFNTVL

SEQ ID NO: 165944 - protein, 9 aa, Homo Sapiens
RGLAHAIRL

SEQ ID NO: 165945 - protein, 9 aa, Homo Sapiens
RGLDKVITV

SEQ ID NO: 165946 - protein, 9 aa, Homo Sapiens
RGLQVHVVV

SEQ ID NO: 165947 - protein, 9 aa, Homo Sapiens
RGMDWILAL

SEQ ID NO: 165948 - protein, 9 aa, Homo Sapiens
RGNDLLLKL

SEQ ID NO: 165949 - protein, 9 aa, Homo Sapiens
RGNPFMLFL

SEQ ID NO: 165950 - protein, 9 aa, Homo Sapiens
RGNPLVVRF

SEQ ID NO: 165951 - protein, 9 aa, Homo Sapiens
RGQLHVLRV

SEQ ID NO: 165952 - protein, 9 aa, Homo Sapiens
RGSNVALML

SEQ ID NO: 165953 - protein, 9 aa, Homo Sapiens
RGSSLHLHV

SEQ ID NO: 165954 - protein, 9 aa, Homo Sapiens
RGTKVILHL

SEQ ID NO: 165955 - protein, 9 aa, Homo Sapiens
RGTTIANVV

SEQ ID NO: 165956 - protein, 9 aa, Homo Sapiens
RGYLFLEVF

SEQ ID NO: 165957 - protein, 9 aa, Homo Sapiens
RGYYSVETV

SEQ ID NO: 165958 - protein, 9 aa, Homo Sapiens
RHMYHSLYL

SEQ ID NO: 165959 - protein, 9 aa, Homo Sapiens
RHNSVQLQV

SEQ ID NO: 165960 - protein, 9 aa, Homo Sapiens
RIADSFQVI

SEQ ID NO: 165961 - protein, 9 aa, Homo Sapiens
RIAEFTTNL

SEQ ID NO: 165962 - protein, 9 aa, Homo Sapiens
RIAPPDRRF

SEQ ID NO: 165963 - protein, 9 aa, Homo Sapiens
RIDGVSLLV

SEQ ID NO: 165964 - protein, 9 aa, Homo Sapiens
RIDSRIIEV

SEQ ID NO: 165965 - protein, 9 aa, Homo Sapiens
RIEELFSIV

SEQ ID NO: 165966 - protein, 9 aa, Homo Sapiens
RIFEKMFAM

SEQ ID NO: 165967 - protein, 9 aa, Homo Sapiens
RIFKDFMHV

SEQ ID NO: 165968 - protein, 9 aa, Homo Sapiens
RIFQTLLEV

SEQ ID NO: 165969 - protein, 9 aa, Homo Sapiens
RIFSRFNAL

SEQ ID NO: 165970 - protein, 9 aa, Homo Sapiens
RIHAHFTGL

SEQ ID NO: 165971 - protein, 9 aa, Homo Sapiens
RIHPFHILI

SEQ ID NO: 165972 - protein, 9 aa, Homo Sapiens
RIHVNFELM

SEQ ID NO: 165973 - protein, 9 aa, Homo Sapiens
RIIAHAQLL

SEQ ID NO: 165974 - protein, 9 aa, Homo Sapiens
RIIDTVAQV

SEQ ID NO: 165975 - protein, 9 aa, Homo Sapiens
RIIERLLKL

SEQ ID NO: 165976 - protein, 9 aa, Homo Sapiens
RIIPRHLQL

SEQ ID NO: 165977 - protein, 9 aa, Homo Sapiens
RIIPWIQQL

SEQ ID NO: 165978 - protein, 9 aa, Homo Sapiens
RIIPYLLRL

SEQ ID NO: 165979 - protein, 9 aa, Homo Sapiens
RIISLFSLL

SEQ ID NO: 165980 - protein, 9 aa, Homo Sapiens
RIKDEFQFL

SEQ ID NO: 165981 - protein, 9 aa, Homo Sapiens
RIKDEFQLL

SEQ ID NO: 165982 - protein, 9 aa, Homo Sapiens
RILSKPIEV

SEQ ID NO: 165983 - protein, 9 aa, Homo Sapiens
RILTDILEV

SEQ ID NO: 165984 - protein, 9 aa, Homo Sapiens
RILVQQFEV

SEQ ID NO: 165985 - protein, 9 aa, Homo Sapiens
RIMEFTTTL

SEQ ID NO: 165986 - protein, 9 aa, Homo Sapiens
RIMNLYQFI

SEQ ID NO: 165987 - protein, 9 aa, Homo Sapiens
RIMYHASKL

SEQ ID NO: 165988 - protein, 9 aa, Homo Sapiens
RINEIVYFL

SEQ ID NO: 165989 - protein, 9 aa, Homo Sapiens
RIPAHRLVL

SEQ ID NO: 165990 - protein, 9 aa, Homo Sapiens
RIPAYFVTV

SEQ ID NO: 165991 - protein, 9 aa, Homo Sapiens
RIPSFVTEL

SEQ ID NO: 165992 - protein, 9 aa, Homo Sapiens
RIQAQFAQL

SEQ ID NO: 165993 - protein, 9 aa, Homo Sapiens
RIQVRFAEL

SEQ ID NO: 165994 - protein, 9 aa, Homo Sapiens
RIRELTAVV

SEQ ID NO: 165995 - protein, 9 aa, Homo Sapiens
RIRESFFRV

SEQ ID NO: 165996 - protein, 9 aa, Homo Sapiens
RIREYFYGF

SEQ ID NO: 165997 - protein, 9 aa, Homo Sapiens
RISDIRLFI

SEQ ID NO: 165998 - protein, 9 aa, Homo Sapiens
RISDVHFSV

SEQ ID NO: 165999 - protein, 9 aa, Homo Sapiens
RISLVFLLL

SEQ ID NO: 166000 - protein, 9 aa, Homo Sapiens
RISPWLLRV

SEQ ID NO: 166001 - protein, 9 aa, Homo Sapiens
RISSKSLKV

SEQ ID NO: 166002 - protein, 9 aa, Homo Sapiens
RITELMQVL

SEQ ID NO: 166003 - protein, 9 aa, Homo Sapiens
RITEYMEHV

SEQ ID NO: 166004 - protein, 9 aa, Homo Sapiens
RITKLFHFL

SEQ ID NO: 166005 - protein, 9 aa, Homo Sapiens
RITPRHLQL

SEQ ID NO: 166006 - protein, 9 aa, Homo Sapiens
RIVAHAVEV

SEQ ID NO: 166007 - protein, 9 aa, Homo Sapiens
RIVELFRNL

SEQ ID NO: 166008 - protein, 9 aa, Homo Sapiens
RIVPRFSEL

SEQ ID NO: 166009 - protein, 9 aa, Homo Sapiens
RIWAPPLLL

SEQ ID NO: 166010 - protein, 9 aa, Homo Sapiens
RIYDITNVL

SEQ ID NO: 166011 - protein, 9 aa, Homo Sapiens
RIYKYIHKV

SEQ ID NO: 166012 - protein, 9 aa, Homo Sapiens
RIYPFLLMV

SEQ ID NO: 166013 - protein, 9 aa, Homo Sapiens
RIYPHGLVL

SEQ ID NO: 166014 - protein, 9 aa, Homo Sapiens
RIYPKGQRL

SEQ ID NO: 166015 - protein, 9 aa, Homo Sapiens
RIYPTFLHL

SEQ ID NO: 166016 - protein, 9 aa, Homo Sapiens
RLFEVPHEL

SEQ ID NO: 166017 - protein, 9 aa, Homo Sapiens
RLINQVLEL

SEQ ID NO: 166018 - protein, 9 aa, Homo Sapiens
RLLEQVLLV

SEQ ID NO: 166019 - protein, 9 aa, Homo Sapiens
RLLPAFLKV

SEQ ID NO: 166020 - protein, 9 aa, Homo Sapiens
RLLPRLLLL

SEQ ID NO: 166021 - protein, 9 aa, Homo Sapiens
RLMGRTLTV

SEQ ID NO: 166022 - protein, 9 aa, Homo Sapiens
RLNKKVVLL

SEQ ID NO: 166023 - protein, 9 aa, Homo Sapiens
RLNPEMLQI

SEQ ID NO: 166024 - protein, 9 aa, Homo Sapiens
RLNPHDIRL

SEQ ID NO: 166025 - protein, 9 aa, Homo Sapiens
RLNPKALTL

SEQ ID NO: 166026 - protein, 9 aa, Homo Sapiens
RLNPLVLLL

SEQ ID NO: 166027 - protein, 9 aa, Homo Sapiens
RLQSKTIKV

SEQ ID NO: 166028 - protein, 9 aa, Homo Sapiens
RLQSKVLKL

SEQ ID NO: 166029 - protein, 9 aa, Homo Sapiens
RLSDVQIYV

SEQ ID NO: 166030 - protein, 9 aa, Homo Sapiens
RLSYNFLQV

SEQ ID NO: 166031 - protein, 9 aa, Homo Sapiens
RMFFHFSEI

SEQ ID NO: 166032 - protein, 9 aa, Homo Sapiens
RMIILPLVV

SEQ ID NO: 166033 - protein, 9 aa, Homo Sapiens
RMLAHPLHV

SEQ ID NO: 166034 - protein, 9 aa, Homo Sapiens
RMLIKLLEV

SEQ ID NO: 166035 - protein, 9 aa, Homo Sapiens
RMLPHAPGV

SEQ ID NO: 166036 - protein, 9 aa, Homo Sapiens
RMNADPLEV

SEQ ID NO: 166037 - protein, 9 aa, Homo Sapiens
RMNSKIMSL

SEQ ID NO: 166038 - protein, 9 aa, Homo Sapiens
RMNTVMLQL

SEQ ID NO: 166039 - protein, 9 aa, Homo Sapiens
RMYEKALQI

SEQ ID NO: 166040 - protein, 9 aa, Homo Sapiens
RNAASFKEV

SEQ ID NO: 166041 - protein, 9 aa, Homo Sapiens
RNADVFLKY

SEQ ID NO: 166042 - protein, 9 aa, Homo Sapiens
RNAELFLQL

SEQ ID NO: 166043 - protein, 9 aa, Homo Sapiens
RNDWLDLRV

SEQ ID NO: 166044 - protein, 9 aa, Homo Sapiens
RNEDVQLRL

SEQ ID NO: 166045 - protein, 9 aa, Homo Sapiens
RNFDEILRV

SEQ ID NO: 166046 - protein, 9 aa, Homo Sapiens
RNFFGPEFV

SEQ ID NO: 166047 - protein, 9 aa, Homo Sapiens
RNFGTVLRL

SEQ ID NO: 166048 - protein, 9 aa, Homo Sapiens
RNFHPFAEL

SEQ ID NO: 166049 - protein, 9 aa, Homo Sapiens
RNFHVFLEY

SEQ ID NO: 166050 - protein, 9 aa, Homo Sapiens
RNFYDFYLV

SEQ ID NO: 166051 - protein, 9 aa, Homo Sapiens
RNGITPLHV

SEQ ID NO: 166052 - protein, 9 aa, Homo Sapiens
RNHPLDLRV

SEQ ID NO: 166053 - protein, 9 aa, Homo Sapiens
RNIAEMQVL

SEQ ID NO: 166054 - protein, 9 aa, Homo Sapiens
RNIAVTTSM

SEQ ID NO: 166055 - protein, 9 aa, Homo Sapiens
RNIDLHYIV

SEQ ID NO: 166056 - protein, 9 aa, Homo Sapiens
RNIEGKQYL

SEQ ID NO: 166057 - protein, 9 aa, Homo Sapiens
RNIFPSNLV

SEQ ID NO: 166058 - protein, 9 aa, Homo Sapiens
RNIGKTLVT

SEQ ID NO: 166059 - protein, 9 aa, Homo Sapiens
RNIGRILGL

SEQ ID NO: 166060 - protein, 9 aa, Homo Sapiens
RNIILMSLL

SEQ ID NO: 166061 - protein, 9 aa, Homo Sapiens
RNIMFMQEL

SEQ ID NO: 166062 - protein, 9 aa, Homo Sapiens
RNIPETLEL

SEQ ID NO: 166063 - protein, 9 aa, Homo Sapiens
RNIPFFPDL

SEQ ID NO: 166064 - protein, 9 aa, Homo Sapiens
RNIPGITLL

SEQ ID NO: 166065 - protein, 9 aa, Homo Sapiens
RNIPGPHMV

SEQ ID NO: 166066 - protein, 9 aa, Homo Sapiens
RNISRIMRV

SEQ ID NO: 166067 - protein, 9 aa, Homo Sapiens
RNLDWFPRM

SEQ ID NO: 166068 - protein, 9 aa, Homo Sapiens
RNLEQVLRL

SEQ ID NO: 166069 - protein, 9 aa, Homo Sapiens
RNLLHDNEL

SEQ ID NO: 166070 - protein, 9 aa, Homo Sapiens
RNLPFMREL

SEQ ID NO: 166071 - protein, 9 aa, Homo Sapiens
RNLPVNFEV

SEQ ID NO: 166072 - protein, 9 aa, Homo Sapiens
RNLYLIMEF

SEQ ID NO: 166073 - protein, 9 aa, Homo Sapiens
RNMAIQQEL

SEQ ID NO: 166074 - protein, 9 aa, Homo Sapiens
RNMEKIQVI

SEQ ID NO: 166075 - protein, 9 aa, Homo Sapiens
RNMPVSFEV

SEQ ID NO: 166076 - protein, 9 aa, Homo Sapiens
RNNSVVQVL

SEQ ID NO: 166077 - protein, 9 aa, Homo Sapiens
RNQDMKLKL

SEQ ID NO: 166078 - protein, 9 aa, Homo Sapiens
RNQLLNIFV

SEQ ID NO: 166079 - protein, 9 aa, Homo Sapiens
RNQNLMLEL

SEQ ID NO: 166080 - protein, 9 aa, Homo Sapiens
RNQPMALSL

SEQ ID NO: 166081 - protein, 9 aa, Homo Sapiens
RNQPVTLDM

SEQ ID NO: 166082 - protein, 9 aa, Homo Sapiens
RNQYQMLVL

SEQ ID NO: 166083 - protein, 9 aa, Homo Sapiens
RNRIIKNEV

SEQ ID NO: 166084 - protein, 9 aa, Homo Sapiens
RNSEQIVEV

SEQ ID NO: 166085 - protein, 9 aa, Homo Sapiens
RNSQWVPTL

SEQ ID NO: 166086 - protein, 9 aa, Homo Sapiens
RNTDEMVEL

SEQ ID NO: 166087 - protein, 9 aa, Homo Sapiens
RNTEYFNQL

SEQ ID NO: 166088 - protein, 9 aa, Homo Sapiens
RNTGQVVHL

SEQ ID NO: 166089 - protein, 9 aa, Homo Sapiens
RNTSRITEL

SEQ ID NO: 166090 - protein, 9 aa, Homo Sapiens
RNVGFQVRL

SEQ ID NO: 166091 - protein, 9 aa, Homo Sapiens
RNVNHLPSL

SEQ ID NO: 166092 - protein, 9 aa, Homo Sapiens
RNVPVNLEL

SEQ ID NO: 166093 - protein, 9 aa, Homo Sapiens
RNVPWDLKL

SEQ ID NO: 166094 - protein, 9 aa, Homo Sapiens
RNYAKAVEL

SEQ ID NO: 166095 - protein, 9 aa, Homo Sapiens
RNYDGLTAL

SEQ ID NO: 166096 - protein, 9 aa, Homo Sapiens
RNYEYLIRL

SEQ ID NO: 166097 - protein, 9 aa, Homo Sapiens
RNYFSELTM

SEQ ID NO: 166098 - protein, 9 aa, Homo Sapiens
RNYFSKLWL

SEQ ID NO: 166099 - protein, 9 aa, Homo Sapiens
RNYPGMLYI

SEQ ID NO: 166100 - protein, 9 aa, Homo Sapiens
RNYVQQVTI

SEQ ID NO: 166101 - protein, 9 aa, Homo Sapiens
RQADFVQVL

SEQ ID NO: 166102 - protein, 9 aa, Homo Sapiens
RQAPPHIEL

SEQ ID NO: 166103 - protein, 9 aa, Homo Sapiens
RQFDHPHIV

SEQ ID NO: 166104 - protein, 9 aa, Homo Sapiens
RQFDNFKRV

SEQ ID NO: 166105 - protein, 9 aa, Homo Sapiens
RQHEIVLKV

SEQ ID NO: 166106 - protein, 9 aa, Homo Sapiens
RQIDQFLVV

SEQ ID NO: 166107 - protein, 9 aa, Homo Sapiens
RQIEYYFSV

SEQ ID NO: 166108 - protein, 9 aa, Homo Sapiens
RQLEKLKEV

SEQ ID NO: 166109 - protein, 9 aa, Homo Sapiens
RQLGHALLV

SEQ ID NO: 166110 - protein, 9 aa, Homo Sapiens
RQMTVIRKV

SEQ ID NO: 166111 - protein, 9 aa, Homo Sapiens
RQNFLALRL

SEQ ID NO: 166112 - protein, 9 aa, Homo Sapiens
RQNHSILKI

SEQ ID NO: 166113 - protein, 9 aa, Homo Sapiens
RQNTIVVKV

SEQ ID NO: 166114 - protein, 9 aa, Homo Sapiens
RQQLHDITV

SEQ ID NO: 166115 - protein, 9 aa, Homo Sapiens
RQTGKILKV

SEQ ID NO: 166116 - protein, 9 aa, Homo Sapiens
RQVGKTLRI

SEQ ID NO: 166117 - protein, 9 aa, Homo Sapiens
RQYENHIFV

SEQ ID NO: 166118 - protein, 9 aa, Homo Sapiens
RSADFLGKV

SEQ ID NO: 166119 - protein, 9 aa, Homo Sapiens
RSAEVTLEV

SEQ ID NO: 166120 - protein, 9 aa, Homo Sapiens
RSAFKLIQL

SEQ ID NO: 166121 - protein, 9 aa, Homo Sapiens
RSAFKLLEV

SEQ ID NO: 166122 - protein, 9 aa, Homo Sapiens
RSAILKMIL

SEQ ID NO: 166123 - protein, 9 aa, Homo Sapiens
RSALPTKTV

SEQ ID NO: 166124 - protein, 9 aa, Homo Sapiens
RSAQLWSQL

SEQ ID NO: 166125 - protein, 9 aa, Homo Sapiens
RSAVVEMLI

SEQ ID NO: 166126 - protein, 9 aa, Homo Sapiens
RSAYFANML

SEQ ID NO: 166127 - protein, 9 aa, Homo Sapiens
RSDSLIRVL

SEQ ID NO: 166128 - protein, 9 aa, Homo Sapiens
RSEAKPLAV

SEQ ID NO: 166129 - protein, 9 aa, Homo Sapiens
RSEEVFLQV

SEQ ID NO: 166130 - protein, 9 aa, Homo Sapiens
RSEEVVRLL

SEQ ID NO: 166131 - protein, 9 aa, Homo Sapiens
RSFDSEFKL

SEQ ID NO: 166132 - protein, 9 aa, Homo Sapiens
RSFEHALML

SEQ ID NO: 166133 - protein, 9 aa, Homo Sapiens
RSFEKAVHV

SEQ ID NO: 166134 - protein, 9 aa, Homo Sapiens
RSFEPILRL

SEQ ID NO: 166135 - protein, 9 aa, Homo Sapiens
RSFFGSLML

SEQ ID NO: 166136 - protein, 9 aa, Homo Sapiens
RSFFHQHYL

SEQ ID NO: 166137 - protein, 9 aa, Homo Sapiens
RSFIFYENL

SEQ ID NO: 166138 - protein, 9 aa, Homo Sapiens
RSFIKAAKL

SEQ ID NO: 166139 - protein, 9 aa, Homo Sapiens
RSFLQALVL

SEQ ID NO: 166140 - protein, 9 aa, Homo Sapiens
RSFPGFQAF

SEQ ID NO: 166141 - protein, 9 aa, Homo Sapiens
RSFPSVREL

SEQ ID NO: 166142 - protein, 9 aa, Homo Sapiens
RSFPTLPTL

SEQ ID NO: 166143 - protein, 9 aa, Homo Sapiens
RSFQRALEL

SEQ ID NO: 166144 - protein, 9 aa, Homo Sapiens
RSFQVALHI

SEQ ID NO: 166145 - protein, 9 aa, Homo Sapiens
RSFTKLPHL

SEQ ID NO: 166146 - protein, 9 aa, Homo Sapiens
RSFTNQIIL

SEQ ID NO: 166147 - protein, 9 aa, Homo Sapiens
RSFVFFSQL

SEQ ID NO: 166148 - protein, 9 aa, Homo Sapiens
RSGHQLIVV

SEQ ID NO: 166149 - protein, 9 aa, Homo Sapiens
RSGNIALSL

SEQ ID NO: 166150 - protein, 9 aa, Homo Sapiens
RSHFQHVFI

SEQ ID NO: 166151 - protein, 9 aa, Homo Sapiens
RSHGFAAEF

SEQ ID NO: 166152 - protein, 9 aa, Homo Sapiens
RSHGVLLEV

SEQ ID NO: 166153 - protein, 9 aa, Homo Sapiens
RSHLNFSML

SEQ ID NO: 166154 - protein, 9 aa, Homo Sapiens
RSHPTILDI

SEQ ID NO: 166155 - protein, 9 aa, Homo Sapiens
RSHSVFTLV

SEQ ID NO: 166156 - protein, 9 aa, Homo Sapiens
RSHYFEGVL

SEQ ID NO: 166157 - protein, 9 aa, Homo Sapiens
RSHYFEVEI

SEQ ID NO: 166158 - protein, 9 aa, Homo Sapiens
RSHYSPIYL

SEQ ID NO: 166159 - protein, 9 aa, Homo Sapiens
RSIAFHSAV

SEQ ID NO: 166160 - protein, 9 aa, Homo Sapiens
RSIAWEKSV

SEQ ID NO: 166161 - protein, 9 aa, Homo Sapiens
RSIDDVVRL

SEQ ID NO: 166162 - protein, 9 aa, Homo Sapiens
RSIDGPIRL

SEQ ID NO: 166163 - protein, 9 aa, Homo Sapiens
RSIDKPFRL

SEQ ID NO: 166164 - protein, 9 aa, Homo Sapiens
RSIDLNRLI

SEQ ID NO: 166165 - protein, 9 aa, Homo Sapiens
RSIDLTVKL

SEQ ID NO: 166166 - protein, 9 aa, Homo Sapiens
RSIDQFANL

SEQ ID NO: 166167 - protein, 9 aa, Homo Sapiens
RSIEEVLRI

SEQ ID NO: 166168 - protein, 9 aa, Homo Sapiens
RSIEEVYYL

SEQ ID NO: 166169 - protein, 9 aa, Homo Sapiens
RSIEHLKQI

SEQ ID NO: 166170 - protein, 9 aa, Homo Sapiens
RSIEVLQKV

SEQ ID NO: 166171 - protein, 9 aa, Homo Sapiens
RSIGALNQV

SEQ ID NO: 166172 - protein, 9 aa, Homo Sapiens
RSIGVYDVV

SEQ ID NO: 166173 - protein, 9 aa, Homo Sapiens
RSIHIFDTL

SEQ ID NO: 166174 - protein, 9 aa, Homo Sapiens
RSIHVIQDL

SEQ ID NO: 166175 - protein, 9 aa, Homo Sapiens
RSIIFANYI

SEQ ID NO: 166176 - protein, 9 aa, Homo Sapiens
RSIILRHLL

SEQ ID NO: 166177 - protein, 9 aa, Homo Sapiens
RSIMEPMSL

SEQ ID NO: 166178 - protein, 9 aa, Homo Sapiens
RSINKLIRI

SEQ ID NO: 166179 - protein, 9 aa, Homo Sapiens
RSIPTMLSV

SEQ ID NO: 166180 - protein, 9 aa, Homo Sapiens
RSIPVWIKI

SEQ ID NO: 166181 - protein, 9 aa, Homo Sapiens
RSISSLLRF

SEQ ID NO: 166182 - protein, 9 aa, Homo Sapiens
RSITVEQHI

SEQ ID NO: 166183 - protein, 9 aa, Homo Sapiens
RSIVLLLKV

SEQ ID NO: 166184 - protein, 9 aa, Homo Sapiens
RSKDIFDQL

SEQ ID NO: 166185 - protein, 9 aa, Homo Sapiens
RSLAHQHVV

SEQ ID NO: 166186 - protein, 9 aa, Homo Sapiens
RSLAQFSYL

SEQ ID NO: 166187 - protein, 9 aa, Homo Sapiens
RSLDDALKL

SEQ ID NO: 166188 - protein, 9 aa, Homo Sapiens
RSLDGRLQV

SEQ ID NO: 166189 - protein, 9 aa, Homo Sapiens
RSLDQQMYL

SEQ ID NO: 166190 - protein, 9 aa, Homo Sapiens
RSLDWQMVF

SEQ ID NO: 166191 - protein, 9 aa, Homo Sapiens
RSLDYVAQL

SEQ ID NO: 166192 - protein, 9 aa, Homo Sapiens
RSLEGRWEV

SEQ ID NO: 166193 - protein, 9 aa, Homo Sapiens
RSLEQDLKV

SEQ ID NO: 166194 - protein, 9 aa, Homo Sapiens
RSLEQNIQL

SEQ ID NO: 166195 - protein, 9 aa, Homo Sapiens
RSLEVILRA

SEQ ID NO: 166196 - protein, 9 aa, Homo Sapiens
RSLFLGRIL

SEQ ID NO: 166197 - protein, 9 aa, Homo Sapiens
RSLGFNTQI

SEQ ID NO: 166198 - protein, 9 aa, Homo Sapiens
RSLGIMQTV

SEQ ID NO: 166199 - protein, 9 aa, Homo Sapiens
RSLGKLTKL

SEQ ID NO: 166200 - protein, 9 aa, Homo Sapiens
RSLGVHLSF

SEQ ID NO: 166201 - protein, 9 aa, Homo Sapiens
RSLHLAVQL

SEQ ID NO: 166202 - protein, 9 aa, Homo Sapiens
RSLHMLLML

SEQ ID NO: 166203 - protein, 9 aa, Homo Sapiens
RSLKQVHLV

SEQ ID NO: 166204 - protein, 9 aa, Homo Sapiens
RSLLHTLEI

SEQ ID NO: 166205 - protein, 9 aa, Homo Sapiens
RSLLLLQLL

SEQ ID NO: 166206 - protein, 9 aa, Homo Sapiens
RSLLQTTFL

SEQ ID NO: 166207 - protein, 9 aa, Homo Sapiens
RSLNLVLMV

SEQ ID NO: 166208 - protein, 9 aa, Homo Sapiens
RSLPFPTVL

SEQ ID NO: 166209 - protein, 9 aa, Homo Sapiens
RSLPHITDV

SEQ ID NO: 166210 - protein, 9 aa, Homo Sapiens
RSLPLFLTL

SEQ ID NO: 166211 - protein, 9 aa, Homo Sapiens
RSLPSSSQL

SEQ ID NO: 166212 - protein, 9 aa, Homo Sapiens
RSLQLHLVF

SEQ ID NO: 166213 - protein, 9 aa, Homo Sapiens
RSLQLSLVM

SEQ ID NO: 166214 - protein, 9 aa, Homo Sapiens
RSLSTTNVF

SEQ ID NO: 166215 - protein, 9 aa, Homo Sapiens
RSLSVPVDL

SEQ ID NO: 166216 - protein, 9 aa, Homo Sapiens
RSLSYPFLL

SEQ ID NO: 166217 - protein, 9 aa, Homo Sapiens
RSLVIISTL

SEQ ID NO: 166218 - protein, 9 aa, Homo Sapiens
RSLVIVKKL

SEQ ID NO: 166219 - protein, 9 aa, Homo Sapiens
RSLWFPSDL

SEQ ID NO: 166220 - protein, 9 aa, Homo Sapiens
RSLWYQQTL

SEQ ID NO: 166221 - protein, 9 aa, Homo Sapiens
RSLYIMRVV

SEQ ID NO: 166222 - protein, 9 aa, Homo Sapiens
RSMAHILKA

SEQ ID NO: 166223 - protein, 9 aa, Homo Sapiens
RSMEAHNIL

SEQ ID NO: 166224 - protein, 9 aa, Homo Sapiens
RSMEEARLV

SEQ ID NO: 166225 - protein, 9 aa, Homo Sapiens
RSMEEQLLV

SEQ ID NO: 166226 - protein, 9 aa, Homo Sapiens
RSMEKVMEI

SEQ ID NO: 166227 - protein, 9 aa, Homo Sapiens
RSMEVSTQL

SEQ ID NO: 166228 - protein, 9 aa, Homo Sapiens
RSMGLPLQF

SEQ ID NO: 166229 - protein, 9 aa, Homo Sapiens
RSMGYFVEV

SEQ ID NO: 166230 - protein, 9 aa, Homo Sapiens
RSMHAIIYL

SEQ ID NO: 166231 - protein, 9 aa, Homo Sapiens
RSMPHQEIL

SEQ ID NO: 166232 - protein, 9 aa, Homo Sapiens
RSMRDLLEV

SEQ ID NO: 166233 - protein, 9 aa, Homo Sapiens
RSMVLKLTL

SEQ ID NO: 166234 - protein, 9 aa, Homo Sapiens
RSNAALLFV

SEQ ID NO: 166235 - protein, 9 aa, Homo Sapiens
RSNFKLVAV

SEQ ID NO: 166236 - protein, 9 aa, Homo Sapiens
RSNIMTLLF

SEQ ID NO: 166237 - protein, 9 aa, Homo Sapiens
RSNIWLAAV

SEQ ID NO: 166238 - protein, 9 aa, Homo Sapiens
RSNLQEIFL

SEQ ID NO: 166239 - protein, 9 aa, Homo Sapiens
RSNLRQLTL

SEQ ID NO: 166240 - protein, 9 aa, Homo Sapiens
RSNLVQVKV

SEQ ID NO: 166241 - protein, 9 aa, Homo Sapiens
RSNPKIWNV

SEQ ID NO: 166242 - protein, 9 aa, Homo Sapiens
RSNTYVIKL

SEQ ID NO: 166243 - protein, 9 aa, Homo Sapiens
RSNVIFYIV

SEQ ID NO: 166244 - protein, 9 aa, Homo Sapiens
RSQEYKIVL

SEQ ID NO: 166245 - protein, 9 aa, Homo Sapiens
RSQFRQIFL

SEQ ID NO: 166246 - protein, 9 aa, Homo Sapiens
RSQFYMLRM

SEQ ID NO: 166247 - protein, 9 aa, Homo Sapiens
RSQGKPIEL

SEQ ID NO: 166248 - protein, 9 aa, Homo Sapiens
RSQLVELLV

SEQ ID NO: 166249 - protein, 9 aa, Homo Sapiens
RSQPVPRSV

SEQ ID NO: 166250 - protein, 9 aa, Homo Sapiens
RSQSRIFYL

SEQ ID NO: 166251 - protein, 9 aa, Homo Sapiens
RSQSWILSV

SEQ ID NO: 166252 - protein, 9 aa, Homo Sapiens
RSQWSTMEL

SEQ ID NO: 166253 - protein, 9 aa, Homo Sapiens
RSRDGLLTV

SEQ ID NO: 166254 - protein, 9 aa, Homo Sapiens
RSRLEVAEV

SEQ ID NO: 166255 - protein, 9 aa, Homo Sapiens
RSSAKRLLL

SEQ ID NO: 166256 - protein, 9 aa, Homo Sapiens
RSSAQHLEV

SEQ ID NO: 166257 - protein, 9 aa, Homo Sapiens
RSSDKVVLV

SEQ ID NO: 166258 - protein, 9 aa, Homo Sapiens
RSSENILTV

SEQ ID NO: 166259 - protein, 9 aa, Homo Sapiens
RSSGRVVSL

SEQ ID NO: 166260 - protein, 9 aa, Homo Sapiens
RSSGYPLTI

SEQ ID NO: 166261 - protein, 9 aa, Homo Sapiens
RSSIRVVRV

SEQ ID NO: 166262 - protein, 9 aa, Homo Sapiens
RSSPCALRL

SEQ ID NO: 166263 - protein, 9 aa, Homo Sapiens
RSSPKALNF

SEQ ID NO: 166264 - protein, 9 aa, Homo Sapiens
RSSPQEIKV

SEQ ID NO: 166265 - protein, 9 aa, Homo Sapiens
RSSQRAVLL

SEQ ID NO: 166266 - protein, 9 aa, Homo Sapiens
RSSSLLRAV

SEQ ID NO: 166267 - protein, 9 aa, Homo Sapiens
RSSSWNMVL

SEQ ID NO: 166268 - protein, 9 aa, Homo Sapiens
RSSTYEVRL

SEQ ID NO: 166269 - protein, 9 aa, Homo Sapiens
RSSVEILRV

SEQ ID NO: 166270 - protein, 9 aa, Homo Sapiens
RSTDSIRLL

SEQ ID NO: 166271 - protein, 9 aa, Homo Sapiens
RSTELIPRL

SEQ ID NO: 166272 - protein, 9 aa, Homo Sapiens
RSTLMALMI

SEQ ID NO: 166273 - protein, 9 aa, Homo Sapiens
RSTLVLHDL

SEQ ID NO: 166274 - protein, 9 aa, Homo Sapiens
RSTPFRYLL

SEQ ID NO: 166275 - protein, 9 aa, Homo Sapiens
RSTVQFHIL

SEQ ID NO: 166276 - protein, 9 aa, Homo Sapiens
RSVDETLRL

SEQ ID NO: 166277 - protein, 9 aa, Homo Sapiens
RSVDGPIRL

SEQ ID NO: 166278 - protein, 9 aa, Homo Sapiens
RSVDIINML

SEQ ID NO: 166279 - protein, 9 aa, Homo Sapiens
RSVDLQTRI

SEQ ID NO: 166280 - protein, 9 aa, Homo Sapiens
RSVDNVQFL

SEQ ID NO: 166281 - protein, 9 aa, Homo Sapiens
RSVDRSLLL

SEQ ID NO: 166282 - protein, 9 aa, Homo Sapiens
RSVEETLRL

SEQ ID NO: 166283 - protein, 9 aa, Homo Sapiens
RSVILISTV

SEQ ID NO: 166284 - protein, 9 aa, Homo Sapiens
RSVLIANTV

SEQ ID NO: 166285 - protein, 9 aa, Homo Sapiens
RSVNIASKL

SEQ ID NO: 166286 - protein, 9 aa, Homo Sapiens
RSVPAVVRI

SEQ ID NO: 166287 - protein, 9 aa, Homo Sapiens
RSVPFQMLL

SEQ ID NO: 166288 - protein, 9 aa, Homo Sapiens
RSVPHLQKV

SEQ ID NO: 166289 - protein, 9 aa, Homo Sapiens
RSVPTWLKL

SEQ ID NO: 166290 - protein, 9 aa, Homo Sapiens
RSVPVRLHV

SEQ ID NO: 166291 - protein, 9 aa, Homo Sapiens
RSVRTVMRV

SEQ ID NO: 166292 - protein, 9 aa, Homo Sapiens
RSVSVDLNV

SEQ ID NO: 166293 - protein, 9 aa, Homo Sapiens
RSVYHQLFM

SEQ ID NO: 166294 - protein, 9 aa, Homo Sapiens
RSWDQQIKL

SEQ ID NO: 166295 - protein, 9 aa, Homo Sapiens
RSYAQNVTV

SEQ ID NO: 166296 - protein, 9 aa, Homo Sapiens
RSYDEQLRL

SEQ ID NO: 166297 - protein, 9 aa, Homo Sapiens
RSYEFFNEL

SEQ ID NO: 166298 - protein, 9 aa, Homo Sapiens
RSYEHWEYL

SEQ ID NO: 166299 - protein, 9 aa, Homo Sapiens
RSYLFLGGI

SEQ ID NO: 166300 - protein, 9 aa, Homo Sapiens
RSYPEILTL

SEQ ID NO: 166301 - protein, 9 aa, Homo Sapiens
RSYPHLRRV

SEQ ID NO: 166302 - protein, 9 aa, Homo Sapiens
RSYPYAFSV

SEQ ID NO: 166303 - protein, 9 aa, Homo Sapiens
RSYSQQLFL

SEQ ID NO: 166304 - protein, 9 aa, Homo Sapiens
RSYSYFIEV

SEQ ID NO: 166305 - protein, 9 aa, Homo Sapiens
RSYSYYVEV

SEQ ID NO: 166306 - protein, 9 aa, Homo Sapiens
RSYTYPLIF

SEQ ID NO: 166307 - protein, 9 aa, Homo Sapiens
RSYWKEVLL

SEQ ID NO: 166308 - protein, 9 aa, Homo Sapiens
RSYWSQTIL

SEQ ID NO: 166309 - protein, 9 aa, Homo Sapiens
RSYWSWVLL

SEQ ID NO: 166310 - protein, 9 aa, Homo Sapiens
RSYYYGKFM

SEQ ID NO: 166311 - protein, 9 aa, Homo Sapiens
RTADVIIMM

SEQ ID NO: 166312 - protein, 9 aa, Homo Sapiens
RTADWRLYL

SEQ ID NO: 166313 - protein, 9 aa, Homo Sapiens
RTAERELLM

SEQ ID NO: 166314 - protein, 9 aa, Homo Sapiens
RTAHVILRY

SEQ ID NO: 166315 - protein, 9 aa, Homo Sapiens
RTATYITEL

SEQ ID NO: 166316 - protein, 9 aa, Homo Sapiens
RTDPIPIVV

SEQ ID NO: 166317 - protein, 9 aa, Homo Sapiens
RTDSVIRLL

SEQ ID NO: 166318 - protein, 9 aa, Homo Sapiens
RTDVNIRVI

SEQ ID NO: 166319 - protein, 9 aa, Homo Sapiens
RTDVVELLL

SEQ ID NO: 166320 - protein, 9 aa, Homo Sapiens
RTFDEFQEL

SEQ ID NO: 166321 - protein, 9 aa, Homo Sapiens
RTFEAFMYL

SEQ ID NO: 166322 - protein, 9 aa, Homo Sapiens
RTFEKIEEV

SEQ ID NO: 166323 - protein, 9 aa, Homo Sapiens
RTFEPRLLV

SEQ ID NO: 166324 - protein, 9 aa, Homo Sapiens
RTFGFLSRL

SEQ ID NO: 166325 - protein, 9 aa, Homo Sapiens
RTFHIFYYL

SEQ ID NO: 166326 - protein, 9 aa, Homo Sapiens
RTFHLLHTV

SEQ ID NO: 166327 - protein, 9 aa, Homo Sapiens
RTFIKPKEL

SEQ ID NO: 166328 - protein, 9 aa, Homo Sapiens
RTFLRPPKV

SEQ ID NO: 166329 - protein, 9 aa, Homo Sapiens
RTFNQFSNL

SEQ ID NO: 166330 - protein, 9 aa, Homo Sapiens
RTFPVLLRL

SEQ ID NO: 166331 - protein, 9 aa, Homo Sapiens
RTFPWIIEV

SEQ ID NO: 166332 - protein, 9 aa, Homo Sapiens
RTFQAFHSV

SEQ ID NO: 166333 - protein, 9 aa, Homo Sapiens
RTFSLFQQL

SEQ ID NO: 166334 - protein, 9 aa, Homo Sapiens
RTFSLVLVL

SEQ ID NO: 166335 - protein, 9 aa, Homo Sapiens
RTGEGFLLV

SEQ ID NO: 166336 - protein, 9 aa, Homo Sapiens
RTGPPRLLV

SEQ ID NO: 166337 - protein, 9 aa, Homo Sapiens
RTGSQPLRV

SEQ ID NO: 166338 - protein, 9 aa, Homo Sapiens
RTIAKRLVL

SEQ ID NO: 166339 - protein, 9 aa, Homo Sapiens
RTIARTIVL

SEQ ID NO: 166340 - protein, 9 aa, Homo Sapiens
RTIATALEY

SEQ ID NO: 166341 - protein, 9 aa, Homo Sapiens
RTIDFVHQV

SEQ ID NO: 166342 - protein, 9 aa, Homo Sapiens
RTIEYLEEV

SEQ ID NO: 166343 - protein, 9 aa, Homo Sapiens
RTIGFFYTL

SEQ ID NO: 166344 - protein, 9 aa, Homo Sapiens
RTIGVITKL

SEQ ID NO: 166345 - protein, 9 aa, Homo Sapiens
RTIGVMTMV

SEQ ID NO: 166346 - protein, 9 aa, Homo Sapiens
RTIPGKQQL

SEQ ID NO: 166347 - protein, 9 aa, Homo Sapiens
RTIPVATTL

SEQ ID NO: 166348 - protein, 9 aa, Homo Sapiens
RTIQAPTQV

SEQ ID NO: 166349 - protein, 9 aa, Homo Sapiens
RTIQMFLVY

SEQ ID NO: 166350 - protein, 9 aa, Homo Sapiens
RTIQRPVTM

SEQ ID NO: 166351 - protein, 9 aa, Homo Sapiens
RTKDTPLSL

SEQ ID NO: 166352 - protein, 9 aa, Homo Sapiens
RTLAEQLEV

SEQ ID NO: 166353 - protein, 9 aa, Homo Sapiens
RTLALQQQL

SEQ ID NO: 166354 - protein, 9 aa, Homo Sapiens
RTLDCIHVL

SEQ ID NO: 166355 - protein, 9 aa, Homo Sapiens
RTLDGRLQV

SEQ ID NO: 166356 - protein, 9 aa, Homo Sapiens
RTLDKVLEV

SEQ ID NO: 166357 - protein, 9 aa, Homo Sapiens
RTLDLPIYV

SEQ ID NO: 166358 - protein, 9 aa, Homo Sapiens
RTLDNQLFF

SEQ ID NO: 166359 - protein, 9 aa, Homo Sapiens
RTLDSVSQI

SEQ ID NO: 166360 - protein, 9 aa, Homo Sapiens
RTLENPVNV

SEQ ID NO: 166361 - protein, 9 aa, Homo Sapiens
RTLEQARQL

SEQ ID NO: 166362 - protein, 9 aa, Homo Sapiens
RTLESKLVL

SEQ ID NO: 166363 - protein, 9 aa, Homo Sapiens
RTLETLIRL

SEQ ID NO: 166364 - protein, 9 aa, Homo Sapiens
RTLKIMLKV

SEQ ID NO: 166365 - protein, 9 aa, Homo Sapiens
RTLLAILRL

SEQ ID NO: 166366 - protein, 9 aa, Homo Sapiens
RTLLRHILV

SEQ ID NO: 166367 - protein, 9 aa, Homo Sapiens
RTLNRILTM

SEQ ID NO: 166368 - protein, 9 aa, Homo Sapiens
RTLPEPLEL

SEQ ID NO: 166369 - protein, 9 aa, Homo Sapiens
RTLPGPSWV

SEQ ID NO: 166370 - protein, 9 aa, Homo Sapiens
RTLPTLQEL

SEQ ID NO: 166371 - protein, 9 aa, Homo Sapiens
RTLPWASVL

SEQ ID NO: 166372 - protein, 9 aa, Homo Sapiens
RTLPWSSVL

SEQ ID NO: 166373 - protein, 9 aa, Homo Sapiens
RTLQNILEV

SEQ ID NO: 166374 - protein, 9 aa, Homo Sapiens
RTLRGVMRV

SEQ ID NO: 166375 - protein, 9 aa, Homo Sapiens
RTLTSWLRV

SEQ ID NO: 166376 - protein, 9 aa, Homo Sapiens
RTLYHLRLL

SEQ ID NO: 166377 - protein, 9 aa, Homo Sapiens
RTMDFGLNV

SEQ ID NO: 166378 - protein, 9 aa, Homo Sapiens
RTMEAFHFV

SEQ ID NO: 166379 - protein, 9 aa, Homo Sapiens
RTMEAPYFL

SEQ ID NO: 166380 - protein, 9 aa, Homo Sapiens
RTMEIFQLL

SEQ ID NO: 166381 - protein, 9 aa, Homo Sapiens
RTMENLVEL

SEQ ID NO: 166382 - protein, 9 aa, Homo Sapiens
RTMEWVQTI

SEQ ID NO: 166383 - protein, 9 aa, Homo Sapiens
RTMPRIPTL

SEQ ID NO: 166384 - protein, 9 aa, Homo Sapiens
RTMQPLAVL

SEQ ID NO: 166385 - protein, 9 aa, Homo Sapiens
RTNFFIQLV

SEQ ID NO: 166386 - protein, 9 aa, Homo Sapiens
RTNGVLLFI

SEQ ID NO: 166387 - protein, 9 aa, Homo Sapiens
RTNNLFKQV

SEQ ID NO: 166388 - protein, 9 aa, Homo Sapiens
RTNRPPLSL

SEQ ID NO: 166389 - protein, 9 aa, Homo Sapiens
RTPVQMMYL

SEQ ID NO: 166390 - protein, 9 aa, Homo Sapiens
RTQAFQVLL

SEQ ID NO: 166391 - protein, 9 aa, Homo Sapiens
RTQHAILYM

SEQ ID NO: 166392 - protein, 9 aa, Homo Sapiens
RTRPPSVQV

SEQ ID NO: 166393 - protein, 9 aa, Homo Sapiens
RTSKFVLRI

SEQ ID NO: 166394 - protein, 9 aa, Homo Sapiens
RTSRTLLLL

SEQ ID NO: 166395 - protein, 9 aa, Homo Sapiens
RTSSVQLRV

SEQ ID NO: 166396 - protein, 9 aa, Homo Sapiens
RTTDIVIRI

SEQ ID NO: 166397 - protein, 9 aa, Homo Sapiens
RTTEILHHL

SEQ ID NO: 166398 - protein, 9 aa, Homo Sapiens
RTTETQVLV

SEQ ID NO: 166399 - protein, 9 aa, Homo Sapiens
RTTNFAGIL

SEQ ID NO: 166400 - protein, 9 aa, Homo Sapiens
RTTPVDLCL

SEQ ID NO: 166401 - protein, 9 aa, Homo Sapiens
RTTSHLLRY

SEQ ID NO: 166402 - protein, 9 aa, Homo Sapiens
RTVDARLKL

SEQ ID NO: 166403 - protein, 9 aa, Homo Sapiens
RTVDLFPVL

SEQ ID NO: 166404 - protein, 9 aa, Homo Sapiens
RTVEKTWKL

SEQ ID NO: 166405 - protein, 9 aa, Homo Sapiens
RTVELFYDV

SEQ ID NO: 166406 - protein, 9 aa, Homo Sapiens
RTVFLPAEV

SEQ ID NO: 166407 - protein, 9 aa, Homo Sapiens
RTVFPNHTV

SEQ ID NO: 166408 - protein, 9 aa, Homo Sapiens
RTVPVFESV

SEQ ID NO: 166409 - protein, 9 aa, Homo Sapiens
RTYDMDVRL

SEQ ID NO: 166410 - protein, 9 aa, Homo Sapiens
RTYEKFFGL

SEQ ID NO: 166411 - protein, 9 aa, Homo Sapiens
RTYIIPRSV

SEQ ID NO: 166412 - protein, 9 aa, Homo Sapiens
RTYLGMSTL

SEQ ID NO: 166413 - protein, 9 aa, Homo Sapiens
RTYQEIQEL

SEQ ID NO: 166414 - protein, 9 aa, Homo Sapiens
RTYRELRLL

SEQ ID NO: 166415 - protein, 9 aa, Homo Sapiens
RTYSFLNLL

SEQ ID NO: 166416 - protein, 9 aa, Homo Sapiens
RTYTQLVRL

SEQ ID NO: 166417 - protein, 9 aa, Homo Sapiens
RTYVYVLTV

SEQ ID NO: 166418 - protein, 9 aa, Homo Sapiens
RVAPEEHPV

SEQ ID NO: 166419 - protein, 9 aa, Homo Sapiens
RVESLFRVI

SEQ ID NO: 166420 - protein, 9 aa, Homo Sapiens
RVFEYMSYL

SEQ ID NO: 166421 - protein, 9 aa, Homo Sapiens
RVFPFFRVL

SEQ ID NO: 166422 - protein, 9 aa, Homo Sapiens
RVFVKPLVL

SEQ ID NO: 166423 - protein, 9 aa, Homo Sapiens
RVGDHMMFV

SEQ ID NO: 166424 - protein, 9 aa, Homo Sapiens
RVGDRILAV

SEQ ID NO: 166425 - protein, 9 aa, Homo Sapiens
RVIDYAVKI

SEQ ID NO: 166426 - protein, 9 aa, Homo Sapiens
RVIDYILDL

SEQ ID NO: 166427 - protein, 9 aa, Homo Sapiens
RVIEPFSRV

SEQ ID NO: 166428 - protein, 9 aa, Homo Sapiens
RVIGTLEEV

SEQ ID NO: 166429 - protein, 9 aa, Homo Sapiens
RVIPLVREV

SEQ ID NO: 166430 - protein, 9 aa, Homo Sapiens
RVIPVLLQL

SEQ ID NO: 166431 - protein, 9 aa, Homo Sapiens
RVLAHMLRA

SEQ ID NO: 166432 - protein, 9 aa, Homo Sapiens
RVLDVILEV

SEQ ID NO: 166433 - protein, 9 aa, Homo Sapiens
RVLFKYFEV

SEQ ID NO: 166434 - protein, 9 aa, Homo Sapiens
RVLGKITLV

SEQ ID NO: 166435 - protein, 9 aa, Homo Sapiens
RVLHQFREL

SEQ ID NO: 166436 - protein, 9 aa, Homo Sapiens
RVLPYVLWL

SEQ ID NO: 166437 - protein, 9 aa, Homo Sapiens
RVLQWVLVL

SEQ ID NO: 166438 - protein, 9 aa, Homo Sapiens
RVMAPRTLI

SEQ ID NO: 166439 - protein, 9 aa, Homo Sapiens
RVMEHFIKL

SEQ ID NO: 166440 - protein, 9 aa, Homo Sapiens
RVMELFFTV

SEQ ID NO: 166441 - protein, 9 aa, Homo Sapiens
RVMEYINRL

SEQ ID NO: 166442 - protein, 9 aa, Homo Sapiens
RVMRTLLLV

SEQ ID NO: 166443 - protein, 9 aa, Homo Sapiens
RVMSGKLTV

SEQ ID NO: 166444 - protein, 9 aa, Homo Sapiens
RVNDQLIAV

SEQ ID NO: 166445 - protein, 9 aa, Homo Sapiens
RVNFIHLIL

SEQ ID NO: 166446 - protein, 9 aa, Homo Sapiens
RVNGRVLDL

SEQ ID NO: 166447 - protein, 9 aa, Homo Sapiens
RVNKAFVNV

SEQ ID NO: 166448 - protein, 9 aa, Homo Sapiens
RVNKLILQL

SEQ ID NO: 166449 - protein, 9 aa, Homo Sapiens
RVNNNVLTI

SEQ ID NO: 166450 - protein, 9 aa, Homo Sapiens
RVNPALAEL

SEQ ID NO: 166451 - protein, 9 aa, Homo Sapiens
RVNPVTLET

SEQ ID NO: 166452 - protein, 9 aa, Homo Sapiens
RVNYHLVNV

SEQ ID NO: 166453 - protein, 9 aa, Homo Sapiens
RVQDPPLQL

SEQ ID NO: 166454 - protein, 9 aa, Homo Sapiens
RVQSHILHL

SEQ ID NO: 166455 - protein, 9 aa, Homo Sapiens
RVRNLFNVV

SEQ ID NO: 166456 - protein, 9 aa, Homo Sapiens
RVSDILRYL

SEQ ID NO: 166457 - protein, 9 aa, Homo Sapiens
RVSDLQMLL

SEQ ID NO: 166458 - protein, 9 aa, Homo Sapiens
RVSEIHSLV

SEQ ID NO: 166459 - protein, 9 aa, Homo Sapiens
RVSELHLEV

SEQ ID NO: 166460 - protein, 9 aa, Homo Sapiens
RVSPPHLTL

SEQ ID NO: 166461 - protein, 9 aa, Homo Sapiens
RVSPVHLQI

SEQ ID NO: 166462 - protein, 9 aa, Homo Sapiens
RVTDEILHL

SEQ ID NO: 166463 - protein, 9 aa, Homo Sapiens
RVTSKALEL

SEQ ID NO: 166464 - protein, 9 aa, Homo Sapiens
RVTVVFSTV

SEQ ID NO: 166465 - protein, 9 aa, Homo Sapiens
RVVDLITNL

SEQ ID NO: 166466 - protein, 9 aa, Homo Sapiens
RVVDQPLKL

SEQ ID NO: 166467 - protein, 9 aa, Homo Sapiens
RVVDRFVEF

SEQ ID NO: 166468 - protein, 9 aa, Homo Sapiens
RVVDYLTKL

SEQ ID NO: 166469 - protein, 9 aa, Homo Sapiens
RVVEHWIEV

SEQ ID NO: 166470 - protein, 9 aa, Homo Sapiens
RVVEKFLKI

SEQ ID NO: 166471 - protein, 9 aa, Homo Sapiens
RVVGRWLLV

SEQ ID NO: 166472 - protein, 9 aa, Homo Sapiens
RVYDVTRFL

SEQ ID NO: 166473 - protein, 9 aa, Homo Sapiens
RVYEILRLL

SEQ ID NO: 166474 - protein, 9 aa, Homo Sapiens
RVYERLLYV

SEQ ID NO: 166475 - protein, 9 aa, Homo Sapiens
RVYEWFGLV

SEQ ID NO: 166476 - protein, 9 aa, Homo Sapiens
RVYFFFTEV

SEQ ID NO: 166477 - protein, 9 aa, Homo Sapiens
RVYNGRLKV

SEQ ID NO: 166478 - protein, 9 aa, Homo Sapiens
SAAPTGPLL

SEQ ID NO: 166479 - protein, 9 aa, Homo Sapiens
SADFPALVV

SEQ ID NO: 166480 - protein, 9 aa, Homo Sapiens
SADTTILFV

SEQ ID NO: 166481 - protein, 9 aa, Homo Sapiens
SAFDHFASV

SEQ ID NO: 166482 - protein, 9 aa, Homo Sapiens
SAFMPVLKV

SEQ ID NO: 166483 - protein, 9 aa, Homo Sapiens
SAFPFPVTV

SEQ ID NO: 166484 - protein, 9 aa, Homo Sapiens
SAGPVHPLV

SEQ ID NO: 166485 - protein, 9 aa, Homo Sapiens
SAIGYIHSL

SEQ ID NO: 166486 - protein, 9 aa, Homo Sapiens
SAIPHPLIM

SEQ ID NO: 166487 - protein, 9 aa, Homo Sapiens
SALNVRLFL

SEQ ID NO: 166488 - protein, 9 aa, Homo Sapiens
SALPFITYL

SEQ ID NO: 166489 - protein, 9 aa, Homo Sapiens
SALPIIQKL

SEQ ID NO: 166490 - protein, 9 aa, Homo Sapiens
SANHNILQI

SEQ ID NO: 166491 - protein, 9 aa, Homo Sapiens
SANIPPLKF

SEQ ID NO: 166492 - protein, 9 aa, Homo Sapiens
SANKCLLKV

SEQ ID NO: 166493 - protein, 9 aa, Homo Sapiens
SANKTMVIV

SEQ ID NO: 166494 - protein, 9 aa, Homo Sapiens
SANRAVVGV

SEQ ID NO: 166495 - protein, 9 aa, Homo Sapiens
SANRHSLMV

SEQ ID NO: 166496 - protein, 9 aa, Homo Sapiens
SAQGKPLAL

SEQ ID NO: 166497 - protein, 9 aa, Homo Sapiens
SASLVHLSL

SEQ ID NO: 166498 - protein, 9 aa, Homo Sapiens
SATYRILEV

SEQ ID NO: 166499 - protein, 9 aa, Homo Sapiens
SAVPKVMKV

SEQ ID NO: 166500 - protein, 9 aa, Homo Sapiens
SAVRWLLEL

SEQ ID NO: 166501 - protein, 9 aa, Homo Sapiens
SAVTRLLIL

SEQ ID NO: 166502 - protein, 9 aa, Homo Sapiens
SGNTYALYV

SEQ ID NO: 166503 - protein, 9 aa, Homo Sapiens
SGQPVPLVV

SEQ ID NO: 166504 - protein, 9 aa, Homo Sapiens
SGTPHALIV

SEQ ID NO: 166505 - protein, 9 aa, Homo Sapiens
SGTTIALKV

SEQ ID NO: 166506 - protein, 9 aa, Homo Sapiens
SGVGIFLRV

SEQ ID NO: 166507 - protein, 9 aa, Homo Sapiens
SIAAVLPKV

SEQ ID NO: 166508 - protein, 9 aa, Homo Sapiens
SIADRPLYL

SEQ ID NO: 166509 - protein, 9 aa, Homo Sapiens
SIAGIFKEV

SEQ ID NO: 166510 - protein, 9 aa, Homo Sapiens
SIFGKQLVV

SEQ ID NO: 166511 - protein, 9 aa, Homo Sapiens
SIFVFTHVL

SEQ ID NO: 166512 - protein, 9 aa, Homo Sapiens
SIHIFDTLL

SEQ ID NO: 166513 - protein, 9 aa, Homo Sapiens
SIIDEFLHI

SEQ ID NO: 166514 - protein, 9 aa, Homo Sapiens
SIIDTELKV

SEQ ID NO: 166515 - protein, 9 aa, Homo Sapiens
SIIGRLLEV

SEQ ID NO: 166516 - protein, 9 aa, Homo Sapiens
SIIPPLFTV

SEQ ID NO: 166517 - protein, 9 aa, Homo Sapiens
SIIPYILKM

SEQ ID NO: 166518 - protein, 9 aa, Homo Sapiens
SIIQRLLEV

SEQ ID NO: 166519 - protein, 9 aa, Homo Sapiens
SILEHQIQV

SEQ ID NO: 166520 - protein, 9 aa, Homo Sapiens
SILESFIHV

SEQ ID NO: 166521 - protein, 9 aa, Homo Sapiens
SILGKFAVV

SEQ ID NO: 166522 - protein, 9 aa, Homo Sapiens
SILQHFLLI

SEQ ID NO: 166523 - protein, 9 aa, Homo Sapiens
SILQHLLLI

SEQ ID NO: 166524 - protein, 9 aa, Homo Sapiens
SILQHLLLV

SEQ ID NO: 166525 - protein, 9 aa, Homo Sapiens
SILRHVAEV

SEQ ID NO: 166526 - protein, 9 aa, Homo Sapiens
SILRRFLVL

SEQ ID NO: 166527 - protein, 9 aa, Homo Sapiens
SIMDRILQI

SEQ ID NO: 166528 - protein, 9 aa, Homo Sapiens
SIMDYVVFV

SEQ ID NO: 166529 - protein, 9 aa, Homo Sapiens
SINAEEVVV

SEQ ID NO: 166530 - protein, 9 aa, Homo Sapiens
SINDKIIEL

SEQ ID NO: 166531 - protein, 9 aa, Homo Sapiens
SINDKQVVL

SEQ ID NO: 166532 - protein, 9 aa, Homo Sapiens
SINEGLLKV

SEQ ID NO: 166533 - protein, 9 aa, Homo Sapiens
SINPKKLVM

SEQ ID NO: 166534 - protein, 9 aa, Homo Sapiens
SINQFALEL

SEQ ID NO: 166535 - protein, 9 aa, Homo Sapiens
SINQTTLEL

SEQ ID NO: 166536 - protein, 9 aa, Homo Sapiens
SINSRFAKV

SEQ ID NO: 166537 - protein, 9 aa, Homo Sapiens
SINSRLQLV

SEQ ID NO: 166538 - protein, 9 aa, Homo Sapiens
SIQAHPLLL

SEQ ID NO: 166539 - protein, 9 aa, Homo Sapiens
SIQPKPLLL

SEQ ID NO: 166540 - protein, 9 aa, Homo Sapiens
SIQSLFLEL

SEQ ID NO: 166541 - protein, 9 aa, Homo Sapiens
SIRGNNIRY

SEQ ID NO: 166542 - protein, 9 aa, Homo Sapiens
SITANILAV

SEQ ID NO: 166543 - protein, 9 aa, Homo Sapiens
SITERALKL

SEQ ID NO: 166544 - protein, 9 aa, Homo Sapiens
SIYRVPLLL

SEQ ID NO: 166545 - protein, 9 aa, Homo Sapiens
SIYSRFVQL

SEQ ID NO: 166546 - protein, 9 aa, Homo Sapiens
SIYVKFPLL

SEQ ID NO: 166547 - protein, 9 aa, Homo Sapiens
SLFPGKLEV

SEQ ID NO: 166548 - protein, 9 aa, Homo Sapiens
SLHDAIMIV

SEQ ID NO: 166549 - protein, 9 aa, Homo Sapiens
SLIKYFLFV

SEQ ID NO: 166550 - protein, 9 aa, Homo Sapiens
SLLGHLMIV

SEQ ID NO: 166551 - protein, 9 aa, Homo Sapiens
SLNAQVLLL

SEQ ID NO: 166552 - protein, 9 aa, Homo Sapiens
SLPVYAIIV

SEQ ID NO: 166553 - protein, 9 aa, Homo Sapiens
SLQKLFREV

SEQ ID NO: 166554 - protein, 9 aa, Homo Sapiens
SLSQVFLHL

SEQ ID NO: 166555 - protein, 9 aa, Homo Sapiens
SLYGQFRVV

SEQ ID NO: 166556 - protein, 9 aa, Homo Sapiens
SLYPHFTLL

SEQ ID NO: 166557 - protein, 9 aa, Homo Sapiens
SMRYFYTAV

SEQ ID NO: 166558 - protein, 9 aa, Homo Sapiens
SMVTAFLVV

SEQ ID NO: 166559 - protein, 9 aa, Homo Sapiens
SMYDKVLML

SEQ ID NO: 166560 - protein, 9 aa, Homo Sapiens
SNAKHLEIL

SEQ ID NO: 166561 - protein, 9 aa, Homo Sapiens
SNFDRFSEM

SEQ ID NO: 166562 - protein, 9 aa, Homo Sapiens
SNHDVILWL

SEQ ID NO: 166563 - protein, 9 aa, Homo Sapiens
SNIDKSLYV

SEQ ID NO: 166564 - protein, 9 aa, Homo Sapiens
SNINQPLEI

SEQ ID NO: 166565 - protein, 9 aa, Homo Sapiens
SNINRQLEV

SEQ ID NO: 166566 - protein, 9 aa, Homo Sapiens
SNNEIVLVL

SEQ ID NO: 166567 - protein, 9 aa, Homo Sapiens
SNNRLFQLV

SEQ ID NO: 166568 - protein, 9 aa, Homo Sapiens
SNSDVIIYV

SEQ ID NO: 166569 - protein, 9 aa, Homo Sapiens
SNYFKMLFV

SEQ ID NO: 166570 - protein, 9 aa, Homo Sapiens
SQLPGLLEL

SEQ ID NO: 166571 - protein, 9 aa, Homo Sapiens
SQNFKVVVV

SEQ ID NO: 166572 - protein, 9 aa, Homo Sapiens
SQNPWQRLV

SEQ ID NO: 166573 - protein, 9 aa, Homo Sapiens
SQYPFPVTL

SEQ ID NO: 166574 - protein, 9 aa, Homo Sapiens
SSAHVYLRL

SEQ ID NO: 166575 - protein, 9 aa, Homo Sapiens
SSAKRPLWL

SEQ ID NO: 166576 - protein, 9 aa, Homo Sapiens
SSAPPHTIL

SEQ ID NO: 166577 - protein, 9 aa, Homo Sapiens
SSAQFALRL

SEQ ID NO: 166578 - protein, 9 aa, Homo Sapiens
SSAVRALEL

SEQ ID NO: 166579 - protein, 9 aa, Homo Sapiens
SSAYCPLEL

SEQ ID NO: 166580 - protein, 9 aa, Homo Sapiens
SSDGHEFIV

SEQ ID NO: 166581 - protein, 9 aa, Homo Sapiens
SSDPIALGV

SEQ ID NO: 166582 - protein, 9 aa, Homo Sapiens
SSDPKVLTL

SEQ ID NO: 166583 - protein, 9 aa, Homo Sapiens
SSEPFGHLV

SEQ ID NO: 166584 - protein, 9 aa, Homo Sapiens
SSFFKSLVI

SEQ ID NO: 166585 - protein, 9 aa, Homo Sapiens
SSFPGVTVI

SEQ ID NO: 166586 - protein, 9 aa, Homo Sapiens
SSFPRFYFV

SEQ ID NO: 166587 - protein, 9 aa, Homo Sapiens
SSFQKVLEL

SEQ ID NO: 166588 - protein, 9 aa, Homo Sapiens
SSFSRFIMV

SEQ ID NO: 166589 - protein, 9 aa, Homo Sapiens
SSGRVQLVV

SEQ ID NO: 166590 - protein, 9 aa, Homo Sapiens
SSGSHLVFV

SEQ ID NO: 166591 - protein, 9 aa, Homo Sapiens
SSHGRVLSL

SEQ ID NO: 166592 - protein, 9 aa, Homo Sapiens
SSHPIILYL

SEQ ID NO: 166593 - protein, 9 aa, Homo Sapiens
SSHYMTLVV

SEQ ID NO: 166594 - protein, 9 aa, Homo Sapiens
SSIEHLTTL

SEQ ID NO: 166595 - protein, 9 aa, Homo Sapiens
SSIEKIVEI

SEQ ID NO: 166596 - protein, 9 aa, Homo Sapiens
SSIGIPIAV

SEQ ID NO: 166597 - protein, 9 aa, Homo Sapiens
SSIPWFLRV

SEQ ID NO: 166598 - protein, 9 aa, Homo Sapiens
SSISKSPLL

SEQ ID NO: 166599 - protein, 9 aa, Homo Sapiens
SSISVILHI

SEQ ID NO: 166600 - protein, 9 aa, Homo Sapiens
SSITSLKKL

SEQ ID NO: 166601 - protein, 9 aa, Homo Sapiens
SSLARLPSL

SEQ ID NO: 166602 - protein, 9 aa, Homo Sapiens
SSLEKSYEL

SEQ ID NO: 166603 - protein, 9 aa, Homo Sapiens
SSLELPLAV

SEQ ID NO: 166604 - protein, 9 aa, Homo Sapiens
SSLQKLLEV

SEQ ID NO: 166605 - protein, 9 aa, Homo Sapiens
SSLQRILEI

SEQ ID NO: 166606 - protein, 9 aa, Homo Sapiens
SSLRRWLEL

SEQ ID NO: 166607 - protein, 9 aa, Homo Sapiens
SSLSHAMVI

SEQ ID NO: 166608 - protein, 9 aa, Homo Sapiens
SSLSKMSYL

SEQ ID NO: 166609 - protein, 9 aa, Homo Sapiens
SSLSRFLMV

SEQ ID NO: 166610 - protein, 9 aa, Homo Sapiens
SSLYHHLHV

SEQ ID NO: 166611 - protein, 9 aa, Homo Sapiens
SSMAEFLKV

SEQ ID NO: 166612 - protein, 9 aa, Homo Sapiens
SSMPRPVKV

SEQ ID NO: 166613 - protein, 9 aa, Homo Sapiens
SSMTRPQEL

SEQ ID NO: 166614 - protein, 9 aa, Homo Sapiens
SSNAIDLVV

SEQ ID NO: 166615 - protein, 9 aa, Homo Sapiens
SSNAVPLKV

SEQ ID NO: 166616 - protein, 9 aa, Homo Sapiens
SSNDMLLFI

SEQ ID NO: 166617 - protein, 9 aa, Homo Sapiens
SSNDRVLAI

SEQ ID NO: 166618 - protein, 9 aa, Homo Sapiens
SSNKALLEM

SEQ ID NO: 166619 - protein, 9 aa, Homo Sapiens
SSNLRNLEI

SEQ ID NO: 166620 - protein, 9 aa, Homo Sapiens
SSNMVIMLI

SEQ ID NO: 166621 - protein, 9 aa, Homo Sapiens
SSNPIIVSC

SEQ ID NO: 166622 - protein, 9 aa, Homo Sapiens
SSNPVPLYA

SEQ ID NO: 166623 - protein, 9 aa, Homo Sapiens
SSNQFLIYV

SEQ ID NO: 166624 - protein, 9 aa, Homo Sapiens
SSNTWSPKL

SEQ ID NO: 166625 - protein, 9 aa, Homo Sapiens
SSNVIQLII

SEQ ID NO: 166626 - protein, 9 aa, Homo Sapiens
SSNVIVLLL

SEQ ID NO: 166627 - protein, 9 aa, Homo Sapiens
SSNVVQLIM

SEQ ID NO: 166628 - protein, 9 aa, Homo Sapiens
SSQELFRLL

SEQ ID NO: 166629 - protein, 9 aa, Homo Sapiens
SSQGTVRFF

SEQ ID NO: 166630 - protein, 9 aa, Homo Sapiens
SSQTQPLKV

SEQ ID NO: 166631 - protein, 9 aa, Homo Sapiens
SSQVHPLAV

SEQ ID NO: 166632 - protein, 9 aa, Homo Sapiens
SSSAVFLII

SEQ ID NO: 166633 - protein, 9 aa, Homo Sapiens
SSSHLNLKV

SEQ ID NO: 166634 - protein, 9 aa, Homo Sapiens
SSSIKDLVL

SEQ ID NO: 166635 - protein, 9 aa, Homo Sapiens
SSSKLTLHV

SEQ ID NO: 166636 - protein, 9 aa, Homo Sapiens
SSSPAVLAL

SEQ ID NO: 166637 - protein, 9 aa, Homo Sapiens
SSSPFIIKV

SEQ ID NO: 166638 - protein, 9 aa, Homo Sapiens
SSSPNIMLL

SEQ ID NO: 166639 - protein, 9 aa, Homo Sapiens
SSSPRPVAL

SEQ ID NO: 166640 - protein, 9 aa, Homo Sapiens
SSSPSPLSI

SEQ ID NO: 166641 - protein, 9 aa, Homo Sapiens
SSSQWALVV

SEQ ID NO: 166642 - protein, 9 aa, Homo Sapiens
SSSSRFLEV

SEQ ID NO: 166643 - protein, 9 aa, Homo Sapiens
SSSTLNLVV

SEQ ID NO: 166644 - protein, 9 aa, Homo Sapiens
SSTDFVLKL

SEQ ID NO: 166645 - protein, 9 aa, Homo Sapiens
SSTRSLLSV

SEQ ID NO: 166646 - protein, 9 aa, Homo Sapiens
SSTSHVPEV

SEQ ID NO: 166647 - protein, 9 aa, Homo Sapiens
SSVDQPLKI

SEQ ID NO: 166648 - protein, 9 aa, Homo Sapiens
SSVGKVSVL

SEQ ID NO: 166649 - protein, 9 aa, Homo Sapiens
SSVHVIMYL

SEQ ID NO: 166650 - protein, 9 aa, Homo Sapiens
SSVPGVRLL

SEQ ID NO: 166651 - protein, 9 aa, Homo Sapiens
SSVPVVLRV

SEQ ID NO: 166652 - protein, 9 aa, Homo Sapiens
SSVTKVLLL

SEQ ID NO: 166653 - protein, 9 aa, Homo Sapiens
SSYAKFNFV

SEQ ID NO: 166654 - protein, 9 aa, Homo Sapiens
SSYAYILMV

SEQ ID NO: 166655 - protein, 9 aa, Homo Sapiens
SSYENELML

SEQ ID NO: 166656 - protein, 9 aa, Homo Sapiens
SSYFHSRIV

SEQ ID NO: 166657 - protein, 9 aa, Homo Sapiens
SSYFRAMFM

SEQ ID NO: 166658 - protein, 9 aa, Homo Sapiens
SSYGKLLLI

SEQ ID NO: 166659 - protein, 9 aa, Homo Sapiens
SSYGNIRAV

SEQ ID NO: 166660 - protein, 9 aa, Homo Sapiens
SSYMPARVV

SEQ ID NO: 166661 - protein, 9 aa, Homo Sapiens
SSYSRALEM

SEQ ID NO: 166662 - protein, 9 aa, Homo Sapiens
SSYYFDLQL

SEQ ID NO: 166663 - protein, 9 aa, Homo Sapiens
SSYYGVVRL

SEQ ID NO: 166664 - protein, 9 aa, Homo Sapiens
STAYYALVV

SEQ ID NO: 166665 - protein, 9 aa, Homo Sapiens
STFGEVLMV

SEQ ID NO: 166666 - protein, 9 aa, Homo Sapiens
STFSGFGFI

SEQ ID NO: 166667 - protein, 9 aa, Homo Sapiens
STHKWMVYV

SEQ ID NO: 166668 - protein, 9 aa, Homo Sapiens
STHSKVLYV

SEQ ID NO: 166669 - protein, 9 aa, Homo Sapiens
STIALALGV

SEQ ID NO: 166670 - protein, 9 aa, Homo Sapiens
STIDHFLEI

SEQ ID NO: 166671 - protein, 9 aa, Homo Sapiens
STIDKVSVL

SEQ ID NO: 166672 - protein, 9 aa, Homo Sapiens
STINTVLKM

SEQ ID NO: 166673 - protein, 9 aa, Homo Sapiens
STIRLLTSL

SEQ ID NO: 166674 - protein, 9 aa, Homo Sapiens
STIVQVLEV

SEQ ID NO: 166675 - protein, 9 aa, Homo Sapiens
STLHLVLRL

SEQ ID NO: 166676 - protein, 9 aa, Homo Sapiens
STLPAGVTV

SEQ ID NO: 166677 - protein, 9 aa, Homo Sapiens
STLRNIRTV

SEQ ID NO: 166678 - protein, 9 aa, Homo Sapiens
STNADALYV

SEQ ID NO: 166679 - protein, 9 aa, Homo Sapiens
STNIHELRV

SEQ ID NO: 166680 - protein, 9 aa, Homo Sapiens
STNKYQLSI

SEQ ID NO: 166681 - protein, 9 aa, Homo Sapiens
STNPITVTV

SEQ ID NO: 166682 - protein, 9 aa, Homo Sapiens
STNQHIIRL

SEQ ID NO: 166683 - protein, 9 aa, Homo Sapiens
STNRFVRTV

SEQ ID NO: 166684 - protein, 9 aa, Homo Sapiens
STNSVKLEM

SEQ ID NO: 166685 - protein, 9 aa, Homo Sapiens
STNSVRLML

SEQ ID NO: 166686 - protein, 9 aa, Homo Sapiens
STNTRVLYF

SEQ ID NO: 166687 - protein, 9 aa, Homo Sapiens
STSLSYITL

SEQ ID NO: 166688 - protein, 9 aa, Homo Sapiens
STSPWIPQL

SEQ ID NO: 166689 - protein, 9 aa, Homo Sapiens
STSSVFRLV

SEQ ID NO: 166690 - protein, 9 aa, Homo Sapiens
STTELPLTV

SEQ ID NO: 166691 - protein, 9 aa, Homo Sapiens
STVFGTLHV

SEQ ID NO: 166692 - protein, 9 aa, Homo Sapiens
STWEKPQEL

SEQ ID NO: 166693 - protein, 9 aa, Homo Sapiens
STYAGIRKV

SEQ ID NO: 166694 - protein, 9 aa, Homo Sapiens
STYLKLRFL

SEQ ID NO: 166695 - protein, 9 aa, Homo Sapiens
STYLRPLLV

SEQ ID NO: 166696 - protein, 9 aa, Homo Sapiens
STYPAPFYV

SEQ ID NO: 166697 - protein, 9 aa, Homo Sapiens
SVANNRLFV

SEQ ID NO: 166698 - protein, 9 aa, Homo Sapiens
SVFKLLPQL

SEQ ID NO: 166699 - protein, 9 aa, Homo Sapiens
SVHKGFAFV

SEQ ID NO: 166700 - protein, 9 aa, Homo Sapiens
SVIEQLFFV

SEQ ID NO: 166701 - protein, 9 aa, Homo Sapiens
SVIPQIQKV

SEQ ID NO: 166702 - protein, 9 aa, Homo Sapiens
SVISHLLRV

SEQ ID NO: 166703 - protein, 9 aa, Homo Sapiens
SVISVVSYL

SEQ ID NO: 166704 - protein, 9 aa, Homo Sapiens
SVLAKALEV

SEQ ID NO: 166705 - protein, 9 aa, Homo Sapiens
SVNATPLTI

SEQ ID NO: 166706 - protein, 9 aa, Homo Sapiens
SVNFVDLYV

SEQ ID NO: 166707 - protein, 9 aa, Homo Sapiens
SVNIQELLL

SEQ ID NO: 166708 - protein, 9 aa, Homo Sapiens
SVNPHDITV

SEQ ID NO: 166709 - protein, 9 aa, Homo Sapiens
SVNPYIVKL

SEQ ID NO: 166710 - protein, 9 aa, Homo Sapiens
SVNRYILQL

SEQ ID NO: 166711 - protein, 9 aa, Homo Sapiens
SVNTLPVVV

SEQ ID NO: 166712 - protein, 9 aa, Homo Sapiens
SVSGDRLIV

SEQ ID NO: 166713 - protein, 9 aa, Homo Sapiens
SVTQIYHAV

SEQ ID NO: 166714 - protein, 9 aa, Homo Sapiens
SVVFHSTVI

SEQ ID NO: 166715 - protein, 9 aa, Homo Sapiens
SVVSFLLRV

SEQ ID NO: 166716 - protein, 9 aa, Homo Sapiens
SVVSQFITV

SEQ ID NO: 166717 - protein, 9 aa, Homo Sapiens
SVYDGKLLI

SEQ ID NO: 166718 - protein, 9 aa, Homo Sapiens
SVYEFFKYL

SEQ ID NO: 166719 - protein, 9 aa, Homo Sapiens
SVYGKLRKV

SEQ ID NO: 166720 - protein, 9 aa, Homo Sapiens
SVYPNGHFV

SEQ ID NO: 166721 - protein, 9 aa, Homo Sapiens
SVYSRVIQV

SEQ ID NO: 166722 - protein, 9 aa, Homo Sapiens
TAAIKDLQV

SEQ ID NO: 166723 - protein, 9 aa, Homo Sapiens
TAAVHIILV

SEQ ID NO: 166724 - protein, 9 aa, Homo Sapiens
TADIPALFL

SEQ ID NO: 166725 - protein, 9 aa, Homo Sapiens
TAFAHLREV

SEQ ID NO: 166726 - protein, 9 aa, Homo Sapiens
TAHPSPLSV

SEQ ID NO: 166727 - protein, 9 aa, Homo Sapiens
TAISLFYEL

SEQ ID NO: 166728 - protein, 9 aa, Homo Sapiens
TALNRFLQV

SEQ ID NO: 166729 - protein, 9 aa, Homo Sapiens
TAMTVQILL

SEQ ID NO: 166730 - protein, 9 aa, Homo Sapiens
TANGYILFF

SEQ ID NO: 166731 - protein, 9 aa, Homo Sapiens
TANRHVLRI

SEQ ID NO: 166732 - protein, 9 aa, Homo Sapiens
TANSKIVVV

SEQ ID NO: 166733 - protein, 9 aa, Homo Sapiens
TASDKILIV

SEQ ID NO: 166734 - protein, 9 aa, Homo Sapiens
TASKVIVAV

SEQ ID NO: 166735 - protein, 9 aa, Homo Sapiens
TASRQHLYV

SEQ ID NO: 166736 - protein, 9 aa, Homo Sapiens
TATMHILVV

SEQ ID NO: 166737 - protein, 9 aa, Homo Sapiens
TATRWPLAV

SEQ ID NO: 166738 - protein, 9 aa, Homo Sapiens
TAYDNFVEL

SEQ ID NO: 166739 - protein, 9 aa, Homo Sapiens
TAYLFSRFV

SEQ ID NO: 166740 - protein, 9 aa, Homo Sapiens
TGFPHMLFM

SEQ ID NO: 166741 - protein, 9 aa, Homo Sapiens
TGVAVFLGV

SEQ ID NO: 166742 - protein, 9 aa, Homo Sapiens
TILPKTGTV

SEQ ID NO: 166743 - protein, 9 aa, Homo Sapiens
TILPKVMQV

SEQ ID NO: 166744 - protein, 9 aa, Homo Sapiens
TIMDKMMVA

SEQ ID NO: 166745 - protein, 9 aa, Homo Sapiens
TINAEELLL

SEQ ID NO: 166746 - protein, 9 aa, Homo Sapiens
TINDIVHVV

SEQ ID NO: 166747 - protein, 9 aa, Homo Sapiens
TIQSIMAIV

SEQ ID NO: 166748 - protein, 9 aa, Homo Sapiens
TIRDKFARL

SEQ ID NO: 166749 - protein, 9 aa, Homo Sapiens
TIRLFWNEV

SEQ ID NO: 166750 - protein, 9 aa, Homo Sapiens
TIRPGWLTV

SEQ ID NO: 166751 - protein, 9 aa, Homo Sapiens
TISPIILYF

SEQ ID NO: 166752 - protein, 9 aa, Homo Sapiens
TIYDRFVHL

SEQ ID NO: 166753 - protein, 9 aa, Homo Sapiens
TIYERFVLV

SEQ ID NO: 166754 - protein, 9 aa, Homo Sapiens
TLKHKFKTL

SEQ ID NO: 166755 - protein, 9 aa, Homo Sapiens
TLMGHMLYL

SEQ ID NO: 166756 - protein, 9 aa, Homo Sapiens
TLNRYLLLM

SEQ ID NO: 166757 - protein, 9 aa, Homo Sapiens
TLNSKLLKV

SEQ ID NO: 166758 - protein, 9 aa, Homo Sapiens
TNIPHVQMV

SEQ ID NO: 166759 - protein, 9 aa, Homo Sapiens
TNMEYAVKV

SEQ ID NO: 166760 - protein, 9 aa, Homo Sapiens
TNQDWMLRV

SEQ ID NO: 166761 - protein, 9 aa, Homo Sapiens
TNSSWLLRL

SEQ ID NO: 166762 - protein, 9 aa, Homo Sapiens
TNVDKPLRI

SEQ ID NO: 166763 - protein, 9 aa, Homo Sapiens
TQNYLKLLL

SEQ ID NO: 166764 - protein, 9 aa, Homo Sapiens
TSAAIYHVL

SEQ ID NO: 166765 - protein, 9 aa, Homo Sapiens
TSAVPNLFV

SEQ ID NO: 166766 - protein, 9 aa, Homo Sapiens
TSDFHQLIL

SEQ ID NO: 166767 - protein, 9 aa, Homo Sapiens
TSDPAEVLV

SEQ ID NO: 166768 - protein, 9 aa, Homo Sapiens
TSDPLELFL

SEQ ID NO: 166769 - protein, 9 aa, Homo Sapiens
TSEIKSLFV

SEQ ID NO: 166770 - protein, 9 aa, Homo Sapiens
TSGINPLLV

SEQ ID NO: 166771 - protein, 9 aa, Homo Sapiens
TSHPVLLTV

SEQ ID NO: 166772 - protein, 9 aa, Homo Sapiens
TSIANLPKL

SEQ ID NO: 166773 - protein, 9 aa, Homo Sapiens
TSIAQLKVV

SEQ ID NO: 166774 - protein, 9 aa, Homo Sapiens
TSIGHVVQL

SEQ ID NO: 166775 - protein, 9 aa, Homo Sapiens
TSIQRIQRL

SEQ ID NO: 166776 - protein, 9 aa, Homo Sapiens
TSISHYVIV

SEQ ID NO: 166777 - protein, 9 aa, Homo Sapiens
TSISLLPAL

SEQ ID NO: 166778 - protein, 9 aa, Homo Sapiens
TSKIPALAV

SEQ ID NO: 166779 - protein, 9 aa, Homo Sapiens
TSMDWLPQL

SEQ ID NO: 166780 - protein, 9 aa, Homo Sapiens
TSMSKILKC

SEQ ID NO: 166781 - protein, 9 aa, Homo Sapiens
TSMTRVIEV

SEQ ID NO: 166782 - protein, 9 aa, Homo Sapiens
TSMVTALQL

SEQ ID NO: 166783 - protein, 9 aa, Homo Sapiens
TSNFQAIRV

SEQ ID NO: 166784 - protein, 9 aa, Homo Sapiens
TSNTVKLLL

SEQ ID NO: 166785 - protein, 9 aa, Homo Sapiens
TSNTYVMVV

SEQ ID NO: 166786 - protein, 9 aa, Homo Sapiens
TSNVLPLLL

SEQ ID NO: 166787 - protein, 9 aa, Homo Sapiens
TSQEYAVKI

SEQ ID NO: 166788 - protein, 9 aa, Homo Sapiens
TSQIQRLIV

SEQ ID NO: 166789 - protein, 9 aa, Homo Sapiens
TSQSRVMNV

SEQ ID NO: 166790 - protein, 9 aa, Homo Sapiens
TSQVKVVEV

SEQ ID NO: 166791 - protein, 9 aa, Homo Sapiens
TSREIFNFV

SEQ ID NO: 166792 - protein, 9 aa, Homo Sapiens
TSSGVVWEV

SEQ ID NO: 166793 - protein, 9 aa, Homo Sapiens
TSSPINIVV

SEQ ID NO: 166794 - protein, 9 aa, Homo Sapiens
TSSPSILTL

SEQ ID NO: 166795 - protein, 9 aa, Homo Sapiens
TSSQKALML

SEQ ID NO: 166796 - protein, 9 aa, Homo Sapiens
TSSVVTLEV

SEQ ID NO: 166797 - protein, 9 aa, Homo Sapiens
TSSWVNLVL

SEQ ID NO: 166798 - protein, 9 aa, Homo Sapiens
TSTGKNLLV

SEQ ID NO: 166799 - protein, 9 aa, Homo Sapiens
TSTPNVHMV

SEQ ID NO: 166800 - protein, 9 aa, Homo Sapiens
TSTSDILKV

SEQ ID NO: 166801 - protein, 9 aa, Homo Sapiens
TSVPKPLKF

SEQ ID NO: 166802 - protein, 9 aa, Homo Sapiens
TSYPDPILL

SEQ ID NO: 166803 - protein, 9 aa, Homo Sapiens
TTFPRPVTV

SEQ ID NO: 166804 - protein, 9 aa, Homo Sapiens
TTISKVSQV

SEQ ID NO: 166805 - protein, 9 aa, Homo Sapiens
TTNGGILTV

SEQ ID NO: 166806 - protein, 9 aa, Homo Sapiens
TTNIQELNV

SEQ ID NO: 166807 - protein, 9 aa, Homo Sapiens
TTNPQELML

SEQ ID NO: 166808 - protein, 9 aa, Homo Sapiens
TTNPYVLMV

SEQ ID NO: 166809 - protein, 9 aa, Homo Sapiens
TTTLHMLTL

SEQ ID NO: 166810 - protein, 9 aa, Homo Sapiens
TVLPFVSTV

SEQ ID NO: 166811 - protein, 9 aa, Homo Sapiens
TVNEIVLKV

SEQ ID NO: 166812 - protein, 9 aa, Homo Sapiens
TVNEVELLV

SEQ ID NO: 166813 - protein, 9 aa, Homo Sapiens
TVNFRKLLL

SEQ ID NO: 166814 - protein, 9 aa, Homo Sapiens
TVNLHLLML

SEQ ID NO: 166815 - protein, 9 aa, Homo Sapiens
TVNSKALEI

SEQ ID NO: 166816 - protein, 9 aa, Homo Sapiens
TVSGRILVV

SEQ ID NO: 166817 - protein, 9 aa, Homo Sapiens
TVTDRYIFV

SEQ ID NO: 166818 - protein, 9 aa, Homo Sapiens
TVYPMERLV

SEQ ID NO: 166819 - protein, 9 aa, Homo Sapiens
VADLVGFLL

SEQ ID NO: 166820 - protein, 9 aa, Homo Sapiens
VAFHIPFEV

SEQ ID NO: 166821 - protein, 9 aa, Homo Sapiens
VAIAGLMEV

SEQ ID NO: 166822 - protein, 9 aa, Homo Sapiens
VAIKAGTTL

SEQ ID NO: 166823 - protein, 9 aa, Homo Sapiens
VAIQAGRLL

SEQ ID NO: 166824 - protein, 9 aa, Homo Sapiens
VALAHIRHV

SEQ ID NO: 166825 - protein, 9 aa, Homo Sapiens
VALEHFVLV

SEQ ID NO: 166826 - protein, 9 aa, Homo Sapiens
VALGHRLDI

SEQ ID NO: 166827 - protein, 9 aa, Homo Sapiens
VALPVFLVI

SEQ ID NO: 166828 - protein, 9 aa, Homo Sapiens
VALPVYLLI

SEQ ID NO: 166829 - protein, 9 aa, Homo Sapiens
VAMGRVVKV

SEQ ID NO: 166830 - protein, 9 aa, Homo Sapiens
VASTQDLRV

SEQ ID NO: 166831 - protein, 9 aa, Homo Sapiens
VASVPHSII

SEQ ID NO: 166832 - protein, 9 aa, Homo Sapiens
VAVAGLLTV

SEQ ID NO: 166833 - protein, 9 aa, Homo Sapiens
VAVPKSMRV

SEQ ID NO: 166834 - protein, 9 aa, Homo Sapiens
VGDIHILEV

SEQ ID NO: 166835 - protein, 9 aa, Homo Sapiens
VGDPVRLEV

SEQ ID NO: 166836 - protein, 9 aa, Homo Sapiens
VGNFKFIYV

SEQ ID NO: 166837 - protein, 9 aa, Homo Sapiens
VGNRHGLLV

SEQ ID NO: 166838 - protein, 9 aa, Homo Sapiens
VGQTRVLML

SEQ ID NO: 166839 - protein, 9 aa, Homo Sapiens
VGSEVHLEI

SEQ ID NO: 166840 - protein, 9 aa, Homo Sapiens
VGTIIYHEV

SEQ ID NO: 166841 - protein, 9 aa, Homo Sapiens
VGTSIHYKV

SEQ ID NO: 166842 - protein, 9 aa, Homo Sapiens
VIAPVLLVV

SEQ ID NO: 166843 - protein, 9 aa, Homo Sapiens
VIATNILLV

SEQ ID NO: 166844 - protein, 9 aa, Homo Sapiens
VIFDRFRGV

SEQ ID NO: 166845 - protein, 9 aa, Homo Sapiens
VIFTKFDEV

SEQ ID NO: 166846 - protein, 9 aa, Homo Sapiens
VIIEKTYSL

SEQ ID NO: 166847 - protein, 9 aa, Homo Sapiens
VIIERLLLL

SEQ ID NO: 166848 - protein, 9 aa, Homo Sapiens
VIIPLLHTV

SEQ ID NO: 166849 - protein, 9 aa, Homo Sapiens
VILDLPLVI

SEQ ID NO: 166850 - protein, 9 aa, Homo Sapiens
VIMSQYLEL

SEQ ID NO: 166851 - protein, 9 aa, Homo Sapiens
VINDWFKVL

SEQ ID NO: 166852 - protein, 9 aa, Homo Sapiens
VINEEALSV

SEQ ID NO: 166853 - protein, 9 aa, Homo Sapiens
VINGHTLCL

SEQ ID NO: 166854 - protein, 9 aa, Homo Sapiens
VINGNIKTV

SEQ ID NO: 166855 - protein, 9 aa, Homo Sapiens
VINGNPITI

SEQ ID NO: 166856 - protein, 9 aa, Homo Sapiens
VINKKQLQL

SEQ ID NO: 166857 - protein, 9 aa, Homo Sapiens
VINKVKLEV

SEQ ID NO: 166858 - protein, 9 aa, Homo Sapiens
VINPEPITL

SEQ ID NO: 166859 - protein, 9 aa, Homo Sapiens
VINPKDLRI

SEQ ID NO: 166860 - protein, 9 aa, Homo Sapiens
VINPTAITV

SEQ ID NO: 166861 - protein, 9 aa, Homo Sapiens
VIQIHLLLI

SEQ ID NO: 166862 - protein, 9 aa, Homo Sapiens
VIRQITATV

SEQ ID NO: 166863 - protein, 9 aa, Homo Sapiens
VIYANFNRI

SEQ ID NO: 166864 - protein, 9 aa, Homo Sapiens
VIYDKDQFV

SEQ ID NO: 166865 - protein, 9 aa, Homo Sapiens
VLNGKLLLV

SEQ ID NO: 166866 - protein, 9 aa, Homo Sapiens
VLYDRPLKI

SEQ ID NO: 166867 - protein, 9 aa, Homo Sapiens
VMDTHLLFL

SEQ ID NO: 166868 - protein, 9 aa, Homo Sapiens
VMNKLRLLV

SEQ ID NO: 166869 - protein, 9 aa, Homo Sapiens
VMRWFQAML

SEQ ID NO: 166870 - protein, 9 aa, Homo Sapiens
VNINRIMSV

SEQ ID NO: 166871 - protein, 9 aa, Homo Sapiens
VNNPHFLIM

SEQ ID NO: 166872 - protein, 9 aa, Homo Sapiens
VNNPKSLSL

SEQ ID NO: 166873 - protein, 9 aa, Homo Sapiens
VQNDTLLQV

SEQ ID NO: 166874 - protein, 9 aa, Homo Sapiens
VQNHEFLLV

SEQ ID NO: 166875 - protein, 9 aa, Homo Sapiens
VQNPALRLV

SEQ ID NO: 166876 - protein, 9 aa, Homo Sapiens
VQYALPLQL

SEQ ID NO: 166877 - protein, 9 aa, Homo Sapiens
VQYAYFKKV

SEQ ID NO: 166878 - protein, 9 aa, Homo Sapiens
VQYNEPLKV

SEQ ID NO: 166879 - protein, 9 aa, Homo Sapiens
VQYPYQLYI

SEQ ID NO: 166880 - protein, 9 aa, Homo Sapiens
VSAAFAVKL

SEQ ID NO: 166881 - protein, 9 aa, Homo Sapiens
VSAENILTV

SEQ ID NO: 166882 - protein, 9 aa, Homo Sapiens
VSAPPMPSV

SEQ ID NO: 166883 - protein, 9 aa, Homo Sapiens
VSARNIMLL

SEQ ID NO: 166884 - protein, 9 aa, Homo Sapiens
VSDTEILKV

SEQ ID NO: 166885 - protein, 9 aa, Homo Sapiens
VSEIRILLV

SEQ ID NO: 166886 - protein, 9 aa, Homo Sapiens
VSFGDFVQV

SEQ ID NO: 166887 - protein, 9 aa, Homo Sapiens
VSFKRSMVL

SEQ ID NO: 166888 - protein, 9 aa, Homo Sapiens
VSFPYVIAL

SEQ ID NO: 166889 - protein, 9 aa, Homo Sapiens
VSFSRPLLV

SEQ ID NO: 166890 - protein, 9 aa, Homo Sapiens
VSFYHWAMV

SEQ ID NO: 166891 - protein, 9 aa, Homo Sapiens
VSGPRLFLL

SEQ ID NO: 166892 - protein, 9 aa, Homo Sapiens
VSHPRYLEL

SEQ ID NO: 166893 - protein, 9 aa, Homo Sapiens
VSIDTVTVL

SEQ ID NO: 166894 - protein, 9 aa, Homo Sapiens
VSIGKGVTV

SEQ ID NO: 166895 - protein, 9 aa, Homo Sapiens
VSIGQSLKV

SEQ ID NO: 166896 - protein, 9 aa, Homo Sapiens
VSILSPKEV

SEQ ID NO: 166897 - protein, 9 aa, Homo Sapiens
VSITFIKQI

SEQ ID NO: 166898 - protein, 9 aa, Homo Sapiens
VSLAEALEV

SEQ ID NO: 166899 - protein, 9 aa, Homo Sapiens
VSLARALFM

SEQ ID NO: 166900 - protein, 9 aa, Homo Sapiens
VSLGHISML

SEQ ID NO: 166901 - protein, 9 aa, Homo Sapiens
VSLGQALEV

SEQ ID NO: 166902 - protein, 9 aa, Homo Sapiens
VSLNRIFTV

SEQ ID NO: 166903 - protein, 9 aa, Homo Sapiens
VSMFRWLEV

SEQ ID NO: 166904 - protein, 9 aa, Homo Sapiens
VSMIPPLLL

SEQ ID NO: 166905 - protein, 9 aa, Homo Sapiens
VSMLRILFL

SEQ ID NO: 166906 - protein, 9 aa, Homo Sapiens
VSMPVFQSL

SEQ ID NO: 166907 - protein, 9 aa, Homo Sapiens
VSNDKALMV

SEQ ID NO: 166908 - protein, 9 aa, Homo Sapiens
VSNDLLLKI

SEQ ID NO: 166909 - protein, 9 aa, Homo Sapiens
VSNDWYATL

SEQ ID NO: 166910 - protein, 9 aa, Homo Sapiens
VSNPLEVYL

SEQ ID NO: 166911 - protein, 9 aa, Homo Sapiens
VSNPQTVGV

SEQ ID NO: 166912 - protein, 9 aa, Homo Sapiens
VSNSGITRV

SEQ ID NO: 166913 - protein, 9 aa, Homo Sapiens
VSNTRTVLL

SEQ ID NO: 166914 - protein, 9 aa, Homo Sapiens
VSNVKPLSL

SEQ ID NO: 166915 - protein, 9 aa, Homo Sapiens
VSQFIHLYL

SEQ ID NO: 166916 - protein, 9 aa, Homo Sapiens
VSQQRALAL

SEQ ID NO: 166917 - protein, 9 aa, Homo Sapiens
VSQYHELVV

SEQ ID NO: 166918 - protein, 9 aa, Homo Sapiens
VSSFVFLRF

SEQ ID NO: 166919 - protein, 9 aa, Homo Sapiens
VSSKVPYEI

SEQ ID NO: 166920 - protein, 9 aa, Homo Sapiens
VSSPNILRL

SEQ ID NO: 166921 - protein, 9 aa, Homo Sapiens
VSTAKHLLL

SEQ ID NO: 166922 - protein, 9 aa, Homo Sapiens
VSTPWLQHL

SEQ ID NO: 166923 - protein, 9 aa, Homo Sapiens
VSTSHLLIL

SEQ ID NO: 166924 - protein, 9 aa, Homo Sapiens
VSTSNISSL

SEQ ID NO: 166925 - protein, 9 aa, Homo Sapiens
VSTTRELYL

SEQ ID NO: 166926 - protein, 9 aa, Homo Sapiens
VSVAHALSL

SEQ ID NO: 166927 - protein, 9 aa, Homo Sapiens
VSVDRVKQL

SEQ ID NO: 166928 - protein, 9 aa, Homo Sapiens
VSVPYPSSL

SEQ ID NO: 166929 - protein, 9 aa, Homo Sapiens
VSYPLSLEL

SEQ ID NO: 166930 - protein, 9 aa, Homo Sapiens
VSYVRSVYL

SEQ ID NO: 166931 - protein, 9 aa, Homo Sapiens
VTATRQLLL

SEQ ID NO: 166932 - protein, 9 aa, Homo Sapiens
VTDAVALRV

SEQ ID NO: 166933 - protein, 9 aa, Homo Sapiens
VTDVGIRYV

SEQ ID NO: 166934 - protein, 9 aa, Homo Sapiens
VTEMNGRIV

SEQ ID NO: 166935 - protein, 9 aa, Homo Sapiens
VTFKSILFV

SEQ ID NO: 166936 - protein, 9 aa, Homo Sapiens
VTFYFQNTF

SEQ ID NO: 166937 - protein, 9 aa, Homo Sapiens
VTHIVPLFL

SEQ ID NO: 166938 - protein, 9 aa, Homo Sapiens
VTIARAIEL

SEQ ID NO: 166939 - protein, 9 aa, Homo Sapiens
VTIDGIRFV

SEQ ID NO: 166940 - protein, 9 aa, Homo Sapiens
VTIGHIALL

SEQ ID NO: 166941 - protein, 9 aa, Homo Sapiens
VTIGVWHTV

SEQ ID NO: 166942 - protein, 9 aa, Homo Sapiens
VTIKKALTL

SEQ ID NO: 166943 - protein, 9 aa, Homo Sapiens
VTITGIVKV

SEQ ID NO: 166944 - protein, 9 aa, Homo Sapiens
VTLEHPLFV

SEQ ID NO: 166945 - protein, 9 aa, Homo Sapiens
VTLLVALKV

SEQ ID NO: 166946 - protein, 9 aa, Homo Sapiens
VTMAHIIQI

SEQ ID NO: 166947 - protein, 9 aa, Homo Sapiens
VTMPAILKL

SEQ ID NO: 166948 - protein, 9 aa, Homo Sapiens
VTNAVLHEV

SEQ ID NO: 166949 - protein, 9 aa, Homo Sapiens
VTNEYQHML

SEQ ID NO: 166950 - protein, 9 aa, Homo Sapiens
VTNPKDVLV

SEQ ID NO: 166951 - protein, 9 aa, Homo Sapiens
VTNPNEVKV

SEQ ID NO: 166952 - protein, 9 aa, Homo Sapiens
VTNSKVKFV

SEQ ID NO: 166953 - protein, 9 aa, Homo Sapiens
VTNSQKLQL

SEQ ID NO: 166954 - protein, 9 aa, Homo Sapiens
VTNSVFHEI

SEQ ID NO: 166955 - protein, 9 aa, Homo Sapiens
VTNTTFLLM

SEQ ID NO: 166956 - protein, 9 aa, Homo Sapiens
VTRDLVSEV

SEQ ID NO: 166957 - protein, 9 aa, Homo Sapiens
VTSHIHLHV

SEQ ID NO: 166958 - protein, 9 aa, Homo Sapiens
VTSNRWLMV

SEQ ID NO: 166959 - protein, 9 aa, Homo Sapiens
VTSRWIPLI

SEQ ID NO: 166960 - protein, 9 aa, Homo Sapiens
VTSSHLPQL

SEQ ID NO: 166961 - protein, 9 aa, Homo Sapiens
VTTDIQVKV

SEQ ID NO: 166962 - protein, 9 aa, Homo Sapiens
VTVENFLRV

SEQ ID NO: 166963 - protein, 9 aa, Homo Sapiens
VTVPPGPSL

SEQ ID NO: 166964 - protein, 9 aa, Homo Sapiens
VTVQPSPYL

SEQ ID NO: 166965 - protein, 9 aa, Homo Sapiens
VTYGFPIML

SEQ ID NO: 166966 - protein, 9 aa, Homo Sapiens
VTYLFPIQV

SEQ ID NO: 166967 - protein, 9 aa, Homo Sapiens
VTYPGELLL

SEQ ID NO: 166968 - protein, 9 aa, Homo Sapiens
VTYSKPRLA

SEQ ID NO: 166969 - protein, 9 aa, Homo Sapiens
VVDGHKLEV

SEQ ID NO: 166970 - protein, 9 aa, Homo Sapiens
VVETGRRLV

SEQ ID NO: 166971 - protein, 9 aa, Homo Sapiens
VVGPHPLVV

SEQ ID NO: 166972 - protein, 9 aa, Homo Sapiens
VVIGKMLIL

SEQ ID NO: 166973 - protein, 9 aa, Homo Sapiens
VVKPPGSSL

SEQ ID NO: 166974 - protein, 9 aa, Homo Sapiens
VVLFFKTLL

SEQ ID NO: 166975 - protein, 9 aa, Homo Sapiens
VVLGQFLVL

SEQ ID NO: 166976 - protein, 9 aa, Homo Sapiens
VVLPYQMLL

SEQ ID NO: 166977 - protein, 9 aa, Homo Sapiens
VVNGRVLEL

SEQ ID NO: 166978 - protein, 9 aa, Homo Sapiens
VVNKIRLKI

SEQ ID NO: 166979 - protein, 9 aa, Homo Sapiens
VVNKTDLKV

SEQ ID NO: 166980 - protein, 9 aa, Homo Sapiens
VVNPQIFTA

SEQ ID NO: 166981 - protein, 9 aa, Homo Sapiens
VVNPYYLRV

SEQ ID NO: 166982 - protein, 9 aa, Homo Sapiens
VVNSGWLVV

SEQ ID NO: 166983 - protein, 9 aa, Homo Sapiens
VVNSVPLDL

SEQ ID NO: 166984 - protein, 9 aa, Homo Sapiens
VVNTHKLRL

SEQ ID NO: 166985 - protein, 9 aa, Homo Sapiens
VVNVWTHLL

SEQ ID NO: 166986 - protein, 9 aa, Homo Sapiens
VVQKLVLFL

SEQ ID NO: 166987 - protein, 9 aa, Homo Sapiens
VVQPQPLVV

SEQ ID NO: 166988 - protein, 9 aa, Homo Sapiens
VVTSPMLLV

SEQ ID NO: 166989 - protein, 9 aa, Homo Sapiens
VVYPWTQRF

SEQ ID NO: 166990 - protein, 9 aa, Homo Sapiens
WQNPHMLFL

SEQ ID NO: 166991 - protein, 9 aa, Homo Sapiens
WQNVRALYI

SEQ ID NO: 166992 - protein, 9 aa, Homo Sapiens
WSLPATATM

SEQ ID NO: 166993 - protein, 9 aa, Homo Sapiens
WSQSRFLYV

SEQ ID NO: 166994 - protein, 9 aa, Homo Sapiens
WSSDSNLLV

SEQ ID NO: 166995 - protein, 9 aa, Homo Sapiens
WTDGIAREV

SEQ ID NO: 166996 - protein, 9 aa, Homo Sapiens
WTSERVVSV

SEQ ID NO: 166997 - protein, 9 aa, Homo Sapiens
WTTSRVLKV

SEQ ID NO: 166998 - protein, 9 aa, Homo Sapiens
YAAQAHLKL

SEQ ID NO: 166999 - protein, 9 aa, Homo Sapiens
YAFAHILTV

SEQ ID NO: 167000 - protein, 9 aa, Homo Sapiens
YAFPKSITV

SEQ ID NO: 167001 - protein, 9 aa, Homo Sapiens
YAIGLVMRL

SEQ ID NO: 167002 - protein, 9 aa, Homo Sapiens
YAIHGVLEV

SEQ ID NO: 167003 - protein, 9 aa, Homo Sapiens
YAIKNIHGV

SEQ ID NO: 167004 - protein, 9 aa, Homo Sapiens
YALNHTLSV

SEQ ID NO: 167005 - protein, 9 aa, Homo Sapiens
YALPAGLEV

SEQ ID NO: 167006 - protein, 9 aa, Homo Sapiens
YAMRYFATV

SEQ ID NO: 167007 - protein, 9 aa, Homo Sapiens
YANAKIYKL

SEQ ID NO: 167008 - protein, 9 aa, Homo Sapiens
YANKYNIML

SEQ ID NO: 167009 - protein, 9 aa, Homo Sapiens
YASAGLLKV

SEQ ID NO: 167010 - protein, 9 aa, Homo Sapiens
YASRFVQLV

SEQ ID NO: 167011 - protein, 9 aa, Homo Sapiens
YASSKLLKI

SEQ ID NO: 167012 - protein, 9 aa, Homo Sapiens
YAYPGVLLI

SEQ ID NO: 167013 - protein, 9 aa, Homo Sapiens
YGMALVRFV

SEQ ID NO: 167014 - protein, 9 aa, Homo Sapiens
YGNKTELLV

SEQ ID NO: 167015 - protein, 9 aa, Homo Sapiens
YGNPNTLRL

SEQ ID NO: 167016 - protein, 9 aa, Homo Sapiens
YGNRQNLEL

SEQ ID NO: 167017 - protein, 9 aa, Homo Sapiens
YGNVVELRI

SEQ ID NO: 167018 - protein, 9 aa, Homo Sapiens
YGSPGILEF

SEQ ID NO: 167019 - protein, 9 aa, Homo Sapiens
YIAGFFLTV

SEQ ID NO: 167020 - protein, 9 aa, Homo Sapiens
YIHVHFLEV

SEQ ID NO: 167021 - protein, 9 aa, Homo Sapiens
YIMDWMDEM

SEQ ID NO: 167022 - protein, 9 aa, Homo Sapiens
YIQEHLLQI

SEQ ID NO: 167023 - protein, 9 aa, Homo Sapiens
YIYMHFGEV

SEQ ID NO: 167024 - protein, 9 aa, Homo Sapiens
YLLDHFLSM

SEQ ID NO: 167025 - protein, 9 aa, Homo Sapiens
YLNALVHLI

SEQ ID NO: 167026 - protein, 9 aa, Homo Sapiens
YLNDLIHSV

SEQ ID NO: 167027 - protein, 9 aa, Homo Sapiens
YLTEVFLHV

SEQ ID NO: 167028 - protein, 9 aa, Homo Sapiens
YLYFFRVLV

SEQ ID NO: 167029 - protein, 9 aa, Homo Sapiens
YNFEKPVVM

SEQ ID NO: 167030 - protein, 9 aa, Homo Sapiens
YNFPVEVEV

SEQ ID NO: 167031 - protein, 9 aa, Homo Sapiens
YNGNTALHV

SEQ ID NO: 167032 - protein, 9 aa, Homo Sapiens
YNIASLVRL

SEQ ID NO: 167033 - protein, 9 aa, Homo Sapiens
YNIDSHLLL

SEQ ID NO: 167034 - protein, 9 aa, Homo Sapiens
YNIEQEQKL

SEQ ID NO: 167035 - protein, 9 aa, Homo Sapiens
YNIEQIMYL

SEQ ID NO: 167036 - protein, 9 aa, Homo Sapiens
YNIPHGPVV

SEQ ID NO: 167037 - protein, 9 aa, Homo Sapiens
YNIPVIHAF

SEQ ID NO: 167038 - protein, 9 aa, Homo Sapiens
YNIQKESTL

SEQ ID NO: 167039 - protein, 9 aa, Homo Sapiens
YNITKSVAV

SEQ ID NO: 167040 - protein, 9 aa, Homo Sapiens
YNLPIILLV

SEQ ID NO: 167041 - protein, 9 aa, Homo Sapiens
YNMEMARKI

SEQ ID NO: 167042 - protein, 9 aa, Homo Sapiens
YNMQIFNEL

SEQ ID NO: 167043 - protein, 9 aa, Homo Sapiens
YNMQYALAV

SEQ ID NO: 167044 - protein, 9 aa, Homo Sapiens
YNNFKSMVV

SEQ ID NO: 167045 - protein, 9 aa, Homo Sapiens
YNNIMALYL

SEQ ID NO: 167046 - protein, 9 aa, Homo Sapiens
YNQGFEIVL

SEQ ID NO: 167047 - protein, 9 aa, Homo Sapiens
YNSFISLTV

SEQ ID NO: 167048 - protein, 9 aa, Homo Sapiens
YNSFVSLSV

SEQ ID NO: 167049 - protein, 9 aa, Homo Sapiens
YNTDVPLVL

SEQ ID NO: 167050 - protein, 9 aa, Homo Sapiens
YNTGAVLFV

SEQ ID NO: 167051 - protein, 9 aa, Homo Sapiens
YNVACILTL

SEQ ID NO: 167052 - protein, 9 aa, Homo Sapiens
YNVWLRAQL

SEQ ID NO: 167053 - protein, 9 aa, Homo Sapiens
YNWERALEL

SEQ ID NO: 167054 - protein, 9 aa, Homo Sapiens
YNYFGFKTL

SEQ ID NO: 167055 - protein, 9 aa, Homo Sapiens
YNYLQRAYI

SEQ ID NO: 167056 - protein, 9 aa, Homo Sapiens
YPDSHQLFV

SEQ ID NO: 167057 - protein, 9 aa, Homo Sapiens
YQNHLILKV

SEQ ID NO: 167058 - protein, 9 aa, Homo Sapiens
YQTALHLAV

SEQ ID NO: 167059 - protein, 9 aa, Homo Sapiens
YQTPLHLAV

SEQ ID NO: 167060 - protein, 9 aa, Homo Sapiens
YQVGVHYEL

SEQ ID NO: 167061 - protein, 9 aa, Homo Sapiens
YQYLRQLEV

SEQ ID NO: 167062 - protein, 9 aa, Homo Sapiens
YQYPRPLLI

SEQ ID NO: 167063 - protein, 9 aa, Homo Sapiens
YSAEPLPEL

SEQ ID NO: 167064 - protein, 9 aa, Homo Sapiens
YSAPVIHVL

SEQ ID NO: 167065 - protein, 9 aa, Homo Sapiens
YSDALEHLL

SEQ ID NO: 167066 - protein, 9 aa, Homo Sapiens
YSDDIPHAL

SEQ ID NO: 167067 - protein, 9 aa, Homo Sapiens
YSDGSLKIV

SEQ ID NO: 167068 - protein, 9 aa, Homo Sapiens
YSDSAVLKL

SEQ ID NO: 167069 - protein, 9 aa, Homo Sapiens
YSFHKFHYL

SEQ ID NO: 167070 - protein, 9 aa, Homo Sapiens
YSFQDKRNL

SEQ ID NO: 167071 - protein, 9 aa, Homo Sapiens
YSFSELLRL

SEQ ID NO: 167072 - protein, 9 aa, Homo Sapiens
YSHKKILQL

SEQ ID NO: 167073 - protein, 9 aa, Homo Sapiens
YSHSLLPVL

SEQ ID NO: 167074 - protein, 9 aa, Homo Sapiens
YSIEKPLKF

SEQ ID NO: 167075 - protein, 9 aa, Homo Sapiens
YSILHANVV

SEQ ID NO: 167076 - protein, 9 aa, Homo Sapiens
YSINWTQKL

SEQ ID NO: 167077 - protein, 9 aa, Homo Sapiens
YSISERLEM

SEQ ID NO: 167078 - protein, 9 aa, Homo Sapiens
YSISFLKQL

SEQ ID NO: 167079 - protein, 9 aa, Homo Sapiens
YSISGPHVL

SEQ ID NO: 167080 - protein, 9 aa, Homo Sapiens
YSISQERFL

SEQ ID NO: 167081 - protein, 9 aa, Homo Sapiens
YSIVAGVFV

SEQ ID NO: 167082 - protein, 9 aa, Homo Sapiens
YSLAAALTL

SEQ ID NO: 167083 - protein, 9 aa, Homo Sapiens
YSLDHISSL

SEQ ID NO: 167084 - protein, 9 aa, Homo Sapiens
YSLELIQMV

SEQ ID NO: 167085 - protein, 9 aa, Homo Sapiens
YSLKHIQEL

SEQ ID NO: 167086 - protein, 9 aa, Homo Sapiens
YSLLQAALL

SEQ ID NO: 167087 - protein, 9 aa, Homo Sapiens
YSLPIVLMV

SEQ ID NO: 167088 - protein, 9 aa, Homo Sapiens
YSLQHKLLL

SEQ ID NO: 167089 - protein, 9 aa, Homo Sapiens
YSLQKLRLV

SEQ ID NO: 167090 - protein, 9 aa, Homo Sapiens
YSLQRQSLL

SEQ ID NO: 167091 - protein, 9 aa, Homo Sapiens
YSMPSTHAM

SEQ ID NO: 167092 - protein, 9 aa, Homo Sapiens
YSMPVHAAV

SEQ ID NO: 167093 - protein, 9 aa, Homo Sapiens
YSNFHPLLV

SEQ ID NO: 167094 - protein, 9 aa, Homo Sapiens
YSNKYLTML

SEQ ID NO: 167095 - protein, 9 aa, Homo Sapiens
YSNLIKLLM

SEQ ID NO: 167096 - protein, 9 aa, Homo Sapiens
YSNNIRQLL

SEQ ID NO: 167097 - protein, 9 aa, Homo Sapiens
YSNVIFLEV

SEQ ID NO: 167098 - protein, 9 aa, Homo Sapiens
YSNVSNLKV

SEQ ID NO: 167099 - protein, 9 aa, Homo Sapiens
YSQKDPLIL

SEQ ID NO: 167100 - protein, 9 aa, Homo Sapiens
YSQVFKETV

SEQ ID NO: 167101 - protein, 9 aa, Homo Sapiens
YSSDPVIEV

SEQ ID NO: 167102 - protein, 9 aa, Homo Sapiens
YSSNHKLVF

SEQ ID NO: 167103 - protein, 9 aa, Homo Sapiens
YSSPEILRV

SEQ ID NO: 167104 - protein, 9 aa, Homo Sapiens
YSSPFDPVL

SEQ ID NO: 167105 - protein, 9 aa, Homo Sapiens
YSSSRTLLF

SEQ ID NO: 167106 - protein, 9 aa, Homo Sapiens
YSTGHVSRL

SEQ ID NO: 167107 - protein, 9 aa, Homo Sapiens
YSTPPHRTV

SEQ ID NO: 167108 - protein, 9 aa, Homo Sapiens
YSVDRLYEL

SEQ ID NO: 167109 - protein, 9 aa, Homo Sapiens
YSVETVTLL

SEQ ID NO: 167110 - protein, 9 aa, Homo Sapiens
YSVKRSLKL

SEQ ID NO: 167111 - protein, 9 aa, Homo Sapiens
YSVPEILRV

SEQ ID NO: 167112 - protein, 9 aa, Homo Sapiens
YSVRVSPQM

SEQ ID NO: 167113 - protein, 9 aa, Homo Sapiens
YSYFSPRTM

SEQ ID NO: 167114 - protein, 9 aa, Homo Sapiens
YSYKEALKL

SEQ ID NO: 167115 - protein, 9 aa, Homo Sapiens
YSYWTKNGV

SEQ ID NO: 167116 - protein, 9 aa, Homo Sapiens
YSYYGPLNL

SEQ ID NO: 167117 - protein, 9 aa, Homo Sapiens
YTDATPLRV

SEQ ID NO: 167118 - protein, 9 aa, Homo Sapiens
YTFNKVLML

SEQ ID NO: 167119 - protein, 9 aa, Homo Sapiens
YTFNVDQKL

SEQ ID NO: 167120 - protein, 9 aa, Homo Sapiens
YTFPAGVSV

SEQ ID NO: 167121 - protein, 9 aa, Homo Sapiens
YTIKGIRNL

SEQ ID NO: 167122 - protein, 9 aa, Homo Sapiens
YTIPLAIKL

SEQ ID NO: 167123 - protein, 9 aa, Homo Sapiens
YTIPPGHQV

SEQ ID NO: 167124 - protein, 9 aa, Homo Sapiens
YTLDSILFL

SEQ ID NO: 167125 - protein, 9 aa, Homo Sapiens
YTLINHRVL

SEQ ID NO: 167126 - protein, 9 aa, Homo Sapiens
YTLKLQVVL

SEQ ID NO: 167127 - protein, 9 aa, Homo Sapiens
YTNEYRLTI

SEQ ID NO: 167128 - protein, 9 aa, Homo Sapiens
YTNWKAFLV

SEQ ID NO: 167129 - protein, 9 aa, Homo Sapiens
YTSDLHFQV

SEQ ID NO: 167130 - protein, 9 aa, Homo Sapiens
YTSGTFRTV

SEQ ID NO: 167131 - protein, 9 aa, Homo Sapiens
YTSKSYLTV

SEQ ID NO: 167132 - protein, 9 aa, Homo Sapiens
YTSPDFLYI

SEQ ID NO: 167133 - protein, 9 aa, Homo Sapiens
YTSPDFLYV

SEQ ID NO: 167134 - protein, 9 aa, Homo Sapiens
YTSPVNPAV

SEQ ID NO: 167135 - protein, 9 aa, Homo Sapiens
YTSRIVVRL

SEQ ID NO: 167136 - protein, 9 aa, Homo Sapiens
YTTDFIYQL

SEQ ID NO: 167137 - protein, 9 aa, Homo Sapiens
YTTDRVMTV

SEQ ID NO: 167138 - protein, 9 aa, Homo Sapiens
YTVKAILIL

SEQ ID NO: 167139 - protein, 9 aa, Homo Sapiens
YTVPAGMTV

SEQ ID NO: 167140 - protein, 9 aa, Homo Sapiens
YTWKKIMRL

SEQ ID NO: 167141 - protein, 9 aa, Homo Sapiens
YTYIGEVLV

SEQ ID NO: 167142 - protein, 9 aa, Homo Sapiens
YTYIGPVLV

SEQ ID NO: 167143 - protein, 9 aa, Homo Sapiens
YTYKRFEGL

SEQ ID NO: 167144 - protein, 9 aa, Homo Sapiens
YTYYYPHYL

SEQ ID NO: 167145 - protein, 9 aa, Homo Sapiens
YVDDVFLRV

SEQ ID NO: 167146 - protein, 9 aa, Homo Sapiens
YVDGRVLVV

SEQ ID NO: 167147 - protein, 9 aa, Homo Sapiens
YVNDIVLAI

SEQ ID NO: 167148 - protein, 9 aa, Homo Sapiens
YVSSVALAV

SEQ ID NO: 167149 - protein, 9 aa, Homo Sapiens
YVTSVILHI

SEQ ID NO: 167150 - protein, 9 aa, Homo Sapiens
YVYSHFLQF

SEQ ID NO: 167151 - protein, 10 aa, Homo Sapiens
AAAAPHLLLL

SEQ ID NO: 167152 - protein, 10 aa, Homo Sapiens
AIIEARGVSV

SEQ ID NO: 167153 - protein, 10 aa, Homo Sapiens
ANSPWVVQLF

SEQ ID NO: 167154 - protein, 10 aa, Homo Sapiens
ANSSVLHDEF

SEQ ID NO: 167155 - protein, 10 aa, Homo Sapiens
ASFNDTFVHV

SEQ ID NO: 167156 - protein, 10 aa, Homo Sapiens
ASLDKFLANV

SEQ ID NO: 167157 - protein, 10 aa, Homo Sapiens
ASMAPGALLL

SEQ ID NO: 167158 - protein, 10 aa, Homo Sapiens
ASTILHLVVM

SEQ ID NO: 167159 - protein, 10 aa, Homo Sapiens
ASTLKTLLFF

SEQ ID NO: 167160 - protein, 10 aa, Homo Sapiens
ASYHGFLPVL

SEQ ID NO: 167161 - protein, 10 aa, Homo Sapiens
DIIHNANDTF

SEQ ID NO: 167162 - protein, 10 aa, Homo Sapiens
DINTDGAVNF

SEQ ID NO: 167163 - protein, 10 aa, Homo Sapiens
DLAGRDLTDY

SEQ ID NO: 167164 - protein, 10 aa, Homo Sapiens
DTNADKQLSF

SEQ ID NO: 167165 - protein, 10 aa, Homo Sapiens
FSFEVEKELF

SEQ ID NO: 167166 - protein, 10 aa, Homo Sapiens
FSIDRALNVA

SEQ ID NO: 167167 - protein, 10 aa, Homo Sapiens
FSIEAAMKII

SEQ ID NO: 167168 - protein, 10 aa, Homo Sapiens
FTILWSVARL

SEQ ID NO: 167169 - protein, 10 aa, Homo Sapiens
FTNDTILDVF

SEQ ID NO: 167170 - protein, 10 aa, Homo Sapiens
GGSLIPLLQL

SEQ ID NO: 167171 - protein, 10 aa, Homo Sapiens
GGTNFRVLLV

SEQ ID NO: 167172 - protein, 10 aa, Homo Sapiens
GPPPPPGKPQ

SEQ ID NO: 167173 - protein, 10 aa, Homo Sapiens
GSTAIALELL

SEQ ID NO: 167174 - protein, 10 aa, Homo Sapiens
HANPILLLVM

SEQ ID NO: 167175 - protein, 10 aa, Homo Sapiens
HNLGIPVLVV

SEQ ID NO: 167176 - protein, 10 aa, Homo Sapiens
HNVDIVLQVL

SEQ ID NO: 167177 - protein, 10 aa, Homo Sapiens
HNVTLALELL

SEQ ID NO: 167178 - protein, 10 aa, Homo Sapiens
HSGPVVAMVW

SEQ ID NO: 167179 - protein, 10 aa, Homo Sapiens
HSYFGSFSSL

SEQ ID NO: 167180 - protein, 10 aa, Homo Sapiens
IGYPHLQEVL

SEQ ID NO: 167181 - protein, 10 aa, Homo Sapiens
IIAPPERKYS

SEQ ID NO: 167182 - protein, 10 aa, Homo Sapiens
IQHVFQNLIL

SEQ ID NO: 167183 - protein, 10 aa, Homo Sapiens
IREADVDQDG

SEQ ID NO: 167184 - protein, 10 aa, Homo Sapiens
ISFVGFQPVL

SEQ ID NO: 167185 - protein, 10 aa, Homo Sapiens
ISMEVPVMVV

SEQ ID NO: 167186 - protein, 10 aa, Homo Sapiens
IVNGHTLLVA

SEQ ID NO: 167187 - protein, 10 aa, Homo Sapiens
KANEHQLITL

SEQ ID NO: 167188 - protein, 10 aa, Homo Sapiens
KANGVTDLLV

SEQ ID NO: 167189 - protein, 10 aa, Homo Sapiens
KAVSSAIAQL

SEQ ID NO: 167190 - protein, 10 aa, Homo Sapiens
KITPLEIEVL

SEQ ID NO: 167191 - protein, 10 aa, Homo Sapiens
KIYERTMAVL

SEQ ID NO: 167192 - protein, 10 aa, Homo Sapiens
KLNPQQFEVL

SEQ ID NO: 167193 - protein, 10 aa, Homo Sapiens
KNIERTLYFL

SEQ ID NO: 167194 - protein, 10 aa, Homo Sapiens
KNIPMTLELL

SEQ ID NO: 167195 - protein, 10 aa, Homo Sapiens
KSAIPHPLIM

SEQ ID NO: 167196 - protein, 10 aa, Homo Sapiens
KSFEGLFYFL

SEQ ID NO: 167197 - protein, 10 aa, Homo Sapiens
KSFNIPLLVL

SEQ ID NO: 167198 - protein, 10 aa, Homo Sapiens
KSFNLPMLML

SEQ ID NO: 167199 - protein, 10 aa, Homo Sapiens
KSFYGSTLFL

SEQ ID NO: 167200 - protein, 10 aa, Homo Sapiens
KSIDFPLTKV

SEQ ID NO: 167201 - protein, 10 aa, Homo Sapiens
KSIDWGILAV

SEQ ID NO: 167202 - protein, 10 aa, Homo Sapiens
KSINPLGGFV

SEQ ID NO: 167203 - protein, 10 aa, Homo Sapiens
KSIYAALYFF

SEQ ID NO: 167204 - protein, 10 aa, Homo Sapiens
KSLPASLSFL

SEQ ID NO: 167205 - protein, 10 aa, Homo Sapiens
KSLVSKGTLV

SEQ ID NO: 167206 - protein, 10 aa, Homo Sapiens
KSNEGKELLV

SEQ ID NO: 167207 - protein, 10 aa, Homo Sapiens
KSNNEIVLVL

SEQ ID NO: 167208 - protein, 10 aa, Homo Sapiens
KSQDKTLKIY

SEQ ID NO: 167209 - protein, 10 aa, Homo Sapiens
KSREFIGSFL

SEQ ID NO: 167210 - protein, 10 aa, Homo Sapiens
KSVDRSLLFL

SEQ ID NO: 167211 - protein, 10 aa, Homo Sapiens
KSYEAKLRLL

SEQ ID NO: 167212 - protein, 10 aa, Homo Sapiens
KSYESQIEVM

SEQ ID NO: 167213 - protein, 10 aa, Homo Sapiens
KTAAFLIPLL

SEQ ID NO: 167214 - protein, 10 aa, Homo Sapiens
KTALLHLLLL

SEQ ID NO: 167215 - protein, 10 aa, Homo Sapiens
KTAQPHPKLL

SEQ ID NO: 167216 - protein, 10 aa, Homo Sapiens
KTFNLPLLML

SEQ ID NO: 167217 - protein, 10 aa, Homo Sapiens
KTGIPLNVLP

SEQ ID NO: 167218 - protein, 10 aa, Homo Sapiens
KTIDGILLLI

SEQ ID NO: 167219 - protein, 10 aa, Homo Sapiens
KTIEDFQQKI

SEQ ID NO: 167220 - protein, 10 aa, Homo Sapiens
KTIEDTLMTV

SEQ ID NO: 167221 - protein, 10 aa, Homo Sapiens
KTIENFLVVN

SEQ ID NO: 167222 - protein, 10 aa, Homo Sapiens
KTIGWKLLSV

SEQ ID NO: 167223 - protein, 10 aa, Homo Sapiens
KTKDWWTYEF

SEQ ID NO: 167224 - protein, 10 aa, Homo Sapiens
KTLAGDVHIV

SEQ ID NO: 167225 - protein, 10 aa, Homo Sapiens
KTLDHVFLVL

SEQ ID NO: 167226 - protein, 10 aa, Homo Sapiens
KTLDVFNIIL

SEQ ID NO: 167227 - protein, 10 aa, Homo Sapiens
KTLSDIFLLF

SEQ ID NO: 167228 - protein, 10 aa, Homo Sapiens
KTMDLPFLEA

SEQ ID NO: 167229 - protein, 10 aa, Homo Sapiens
KTMEAISEVL

SEQ ID NO: 167230 - protein, 10 aa, Homo Sapiens
KTMEDTLMTV

SEQ ID NO: 167231 - protein, 10 aa, Homo Sapiens
KTNGATPLLM

SEQ ID NO: 167232 - protein, 10 aa, Homo Sapiens
KTNHVFFLLL

SEQ ID NO: 167233 - protein, 10 aa, Homo Sapiens
KTPDFESTGL

SEQ ID NO: 167234 - protein, 10 aa, Homo Sapiens
KTVEIVHIDI

SEQ ID NO: 167235 - protein, 10 aa, Homo Sapiens
KTVLPFVSTV

SEQ ID NO: 167236 - protein, 10 aa, Homo Sapiens
KTYDLLFKLL

SEQ ID NO: 167237 - protein, 10 aa, Homo Sapiens
KTYDYLFKLL

SEQ ID NO: 167238 - protein, 10 aa, Homo Sapiens
KTYEGSFNAL

SEQ ID NO: 167239 - protein, 10 aa, Homo Sapiens
KTYGVSFFLV

SEQ ID NO: 167240 - protein, 10 aa, Homo Sapiens
KVFDFAGEEV

SEQ ID NO: 167241 - protein, 10 aa, Homo Sapiens
KVFNRYLEVM

SEQ ID NO: 167242 - protein, 10 aa, Homo Sapiens
KVNDFLAEIF

SEQ ID NO: 167243 - protein, 10 aa, Homo Sapiens
KVPQLEIVPN

SEQ ID NO: 167244 - protein, 10 aa, Homo Sapiens
KVSPVSYLRV

SEQ ID NO: 167245 - protein, 10 aa, Homo Sapiens
KVYERAVEFF

SEQ ID NO: 167246 - protein, 10 aa, Homo Sapiens
LAAPGHPPVL

SEQ ID NO: 167247 - protein, 10 aa, Homo Sapiens
LDTNADKQLS

SEQ ID NO: 167248 - protein, 10 aa, Homo Sapiens
LSMPASLGRM

SEQ ID NO: 167249 - protein, 10 aa, Homo Sapiens
LSNAHIQNEL

SEQ ID NO: 167250 - protein, 10 aa, Homo Sapiens
LSNNQRYLFL

SEQ ID NO: 167251 - protein, 10 aa, Homo Sapiens
LSSLVILEVL

SEQ ID NO: 167252 - protein, 10 aa, Homo Sapiens
LTNRPIAVVI

SEQ ID NO: 167253 - protein, 10 aa, Homo Sapiens
NFPEHIFPAL

SEQ ID NO: 167254 - protein, 10 aa, Homo Sapiens
NNGIPPVQVF

SEQ ID NO: 167255 - protein, 10 aa, Homo Sapiens
QQYEIWRELF

SEQ ID NO: 167256 - protein, 10 aa, Homo Sapiens
QSIERAKELF

SEQ ID NO: 167257 - protein, 10 aa, Homo Sapiens
QSIPAEIENL

SEQ ID NO: 167258 - protein, 10 aa, Homo Sapiens
QSTDIIRYLF

SEQ ID NO: 167259 - protein, 10 aa, Homo Sapiens
QSYWNHRELM

SEQ ID NO: 167260 - protein, 10 aa, Homo Sapiens
RAASAFFTYV

SEQ ID NO: 167261 - protein, 10 aa, Homo Sapiens
RAFAFTNLLL

SEQ ID NO: 167262 - protein, 10 aa, Homo Sapiens
RAFHHGRFIM

SEQ ID NO: 167263 - protein, 10 aa, Homo Sapiens
RALDGAWLMV

SEQ ID NO: 167264 - protein, 10 aa, Homo Sapiens
RAMEGELGEL

SEQ ID NO: 167265 - protein, 10 aa, Homo Sapiens
REAAGLFRLL

SEQ ID NO: 167266 - protein, 10 aa, Homo Sapiens
RIMEFTTTLL

SEQ ID NO: 167267 - protein, 10 aa, Homo Sapiens
RIPSFGFSVV

SEQ ID NO: 167268 - protein, 10 aa, Homo Sapiens
RIVATKPLYV

SEQ ID NO: 167269 - protein, 10 aa, Homo Sapiens
RIVGSKPLYV

SEQ ID NO: 167270 - protein, 10 aa, Homo Sapiens
RIYAAFKEVL

SEQ ID NO: 167271 - protein, 10 aa, Homo Sapiens
RIYPFLLMVV

SEQ ID NO: 167272 - protein, 10 aa, Homo Sapiens
RIYPHGLVLL

SEQ ID NO: 167273 - protein, 10 aa, Homo Sapiens
RMSPFPLTSM

SEQ ID NO: 167274 - protein, 10 aa, Homo Sapiens
RNFDRAFSYI

SEQ ID NO: 167275 - protein, 10 aa, Homo Sapiens
RNHNFDGLDV

SEQ ID NO: 167276 - protein, 10 aa, Homo Sapiens
RNIDDHSRFV

SEQ ID NO: 167277 - protein, 10 aa, Homo Sapiens
RNKDPQEILL

SEQ ID NO: 167278 - protein, 10 aa, Homo Sapiens
RNLDLSWSEL

SEQ ID NO: 167279 - protein, 10 aa, Homo Sapiens
RNNEVDLLFL

SEQ ID NO: 167280 - protein, 10 aa, Homo Sapiens
RNTAVSLEVL

SEQ ID NO: 167281 - protein, 10 aa, Homo Sapiens
RNTSVVVTLL

SEQ ID NO: 167282 - protein, 10 aa, Homo Sapiens
RNYFSDIDFF

SEQ ID NO: 167283 - protein, 10 aa, Homo Sapiens
RNYVQQVTIL

SEQ ID NO: 167284 - protein, 10 aa, Homo Sapiens
RQAEITRLLL

SEQ ID NO: 167285 - protein, 10 aa, Homo Sapiens
RQKDVKIVTV

SEQ ID NO: 167286 - protein, 10 aa, Homo Sapiens
RQMDIIVSEV

SEQ ID NO: 167287 - protein, 10 aa, Homo Sapiens
RQYPWGTVQV

SEQ ID NO: 167288 - protein, 10 aa, Homo Sapiens
RQYPWGVAEV

SEQ ID NO: 167289 - protein, 10 aa, Homo Sapiens
RSAEKLALFL

SEQ ID NO: 167290 - protein, 10 aa, Homo Sapiens
RSDEHVRTEL

SEQ ID NO: 167291 - protein, 10 aa, Homo Sapiens
RSDPSVPKIV

SEQ ID NO: 167292 - protein, 10 aa, Homo Sapiens
RSFDLGRQFL

SEQ ID NO: 167293 - protein, 10 aa, Homo Sapiens
RSFEHALMLF

SEQ ID NO: 167294 - protein, 10 aa, Homo Sapiens
RSFNPFFPLL

SEQ ID NO: 167295 - protein, 10 aa, Homo Sapiens
RSFNSNFTTV

SEQ ID NO: 167296 - protein, 10 aa, Homo Sapiens
RSGYPLRILL

SEQ ID NO: 167297 - protein, 10 aa, Homo Sapiens
RSHYFEVEIV

SEQ ID NO: 167298 - protein, 10 aa, Homo Sapiens
RSIAEMGAYV

SEQ ID NO: 167299 - protein, 10 aa, Homo Sapiens
RSIEEVLRIL

SEQ ID NO: 167300 - protein, 10 aa, Homo Sapiens
RSIEHLKQIF

SEQ ID NO: 167301 - protein, 10 aa, Homo Sapiens
RSISESFLTV

SEQ ID NO: 167302 - protein, 10 aa, Homo Sapiens
RSLAAFLQQL

SEQ ID NO: 167303 - protein, 10 aa, Homo Sapiens
RSLDSVQELM

SEQ ID NO: 167304 - protein, 10 aa, Homo Sapiens
RSLDWQMVFL

SEQ ID NO: 167305 - protein, 10 aa, Homo Sapiens
RSLEAKGVTV

SEQ ID NO: 167306 - protein, 10 aa, Homo Sapiens
RSLHDAIMIV

SEQ ID NO: 167307 - protein, 10 aa, Homo Sapiens
RSLHYQFYVW

SEQ ID NO: 167308 - protein, 10 aa, Homo Sapiens
RSLLHRNLVL

SEQ ID NO: 167309 - protein, 10 aa, Homo Sapiens
RSLSVTLAGF

SEQ ID NO: 167310 - protein, 10 aa, Homo Sapiens
RSMDTIVGML

SEQ ID NO: 167311 - protein, 10 aa, Homo Sapiens
RSMEEQLLVV

SEQ ID NO: 167312 - protein, 10 aa, Homo Sapiens
RSMGFIGHYL

SEQ ID NO: 167313 - protein, 10 aa, Homo Sapiens
RSMGYFVEVL

SEQ ID NO: 167314 - protein, 10 aa, Homo Sapiens
RSNELIWLEL

SEQ ID NO: 167315 - protein, 10 aa, Homo Sapiens
RSNGYILEML

SEQ ID NO: 167316 - protein, 10 aa, Homo Sapiens
RSNPSVFVIF

SEQ ID NO: 167317 - protein, 10 aa, Homo Sapiens
RSSGSHLVFV

SEQ ID NO: 167318 - protein, 10 aa, Homo Sapiens
RSSTVTVLLL

SEQ ID NO: 167319 - protein, 10 aa, Homo Sapiens
RSTLVLHDLL

SEQ ID NO: 167320 - protein, 10 aa, Homo Sapiens
RSVDVTNTTF

SEQ ID NO: 167321 - protein, 10 aa, Homo Sapiens
RSVEGWILFV

SEQ ID NO: 167322 - protein, 10 aa, Homo Sapiens
RSVPFQMLLL

SEQ ID NO: 167323 - protein, 10 aa, Homo Sapiens
RSYDFEFMQV

SEQ ID NO: 167324 - protein, 10 aa, Homo Sapiens
RSYFAFLQTV

SEQ ID NO: 167325 - protein, 10 aa, Homo Sapiens
RSYLFLGGIL

SEQ ID NO: 167326 - protein, 10 aa, Homo Sapiens
RSYSDPPLKF

SEQ ID NO: 167327 - protein, 10 aa, Homo Sapiens
RTADWRLYLF

SEQ ID NO: 167328 - protein, 10 aa, Homo Sapiens
RTAGPHTQFV

SEQ ID NO: 167329 - protein, 10 aa, Homo Sapiens
RTGKPLSVEL

SEQ ID NO: 167330 - protein, 10 aa, Homo Sapiens
RTIDKLLAIP

SEQ ID NO: 167331 - protein, 10 aa, Homo Sapiens
RTIGFFYTLF

SEQ ID NO: 167332 - protein, 10 aa, Homo Sapiens
RTILGGIAFV

SEQ ID NO: 167333 - protein, 10 aa, Homo Sapiens
RTLDKIMILF

SEQ ID NO: 167334 - protein, 10 aa, Homo Sapiens
RTLDNQLFFF

SEQ ID NO: 167335 - protein, 10 aa, Homo Sapiens
RTLPFQLSSV

SEQ ID NO: 167336 - protein, 10 aa, Homo Sapiens
RTPDTPFSLF

SEQ ID NO: 167337 - protein, 10 aa, Homo Sapiens
RTVELFYDVL

SEQ ID NO: 167338 - protein, 10 aa, Homo Sapiens
RTYEKFFGLL

SEQ ID NO: 167339 - protein, 10 aa, Homo Sapiens
RVAPAHGLFL

SEQ ID NO: 167340 - protein, 10 aa, Homo Sapiens
RVAPEEHPVL

SEQ ID NO: 167341 - protein, 10 aa, Homo Sapiens
RVLDFDPMAV

SEQ ID NO: 167342 - protein, 10 aa, Homo Sapiens
RVMAPRTLIL

SEQ ID NO: 167343 - protein, 10 aa, Homo Sapiens
RVYDFVGLLV

SEQ ID NO: 167344 - protein, 10 aa, Homo Sapiens
RVYEWFGLVL

SEQ ID NO: 167345 - protein, 10 aa, Homo Sapiens
SMDNNRNLDL

SEQ ID NO: 167346 - protein, 10 aa, Homo Sapiens
SSFDFRTSEI

SEQ ID NO: 167347 - protein, 10 aa, Homo Sapiens
SSLSRFLMVM

SEQ ID NO: 167348 - protein, 10 aa, Homo Sapiens
SSMAYSLYLF

SEQ ID NO: 167349 - protein, 10 aa, Homo Sapiens
STSAVPNLFV

SEQ ID NO: 167350 - protein, 10 aa, Homo Sapiens
TANRHVLRIL

SEQ ID NO: 167351 - protein, 10 aa, Homo Sapiens
TTEGIPVLIV

SEQ ID NO: 167352 - protein, 10 aa, Homo Sapiens
TTTNVFHFTF

SEQ ID NO: 167353 - protein, 10 aa, Homo Sapiens
TVNEVELLVM

SEQ ID NO: 167354 - protein, 10 aa, Homo Sapiens
VAAPSWLHRF

SEQ ID NO: 167355 - protein, 10 aa, Homo Sapiens
VGGGSSTIKY

SEQ ID NO: 167356 - protein, 10 aa, Homo Sapiens
VINSQTFVVL

SEQ ID NO: 167357 - protein, 10 aa, Homo Sapiens
VKARTAQLAK

SEQ ID NO: 167358 - protein, 10 aa, Homo Sapiens
VSNDKALMVL

SEQ ID NO: 167359 - protein, 10 aa, Homo Sapiens
VSTASHLLVL

SEQ ID NO: 167360 - protein, 10 aa, Homo Sapiens
VVNGRVLELF

SEQ ID NO: 167361 - protein, 10 aa, Homo Sapiens
VVYPWTQRFF

SEQ ID NO: 167362 - protein, 10 aa, Homo Sapiens
YAANPHSFVF

SEQ ID NO: 167363 - protein, 10 aa, Homo Sapiens
YALAARDVFL

SEQ ID NO: 167364 - protein, 10 aa, Homo Sapiens
YANKYNIMLV

SEQ ID NO: 167365 - protein, 10 aa, Homo Sapiens
YGVDGKLLQL

SEQ ID NO: 167366 - protein, 10 aa, Homo Sapiens
YSFKFGFNEF

SEQ ID NO: 167367 - protein, 10 aa, Homo Sapiens
YSIGSKPLQI

SEQ ID NO: 167368 - protein, 10 aa, Homo Sapiens
YSLDHISSLF

SEQ ID NO: 167369 - protein, 10 aa, Homo Sapiens
YSSPFDPVLF

SEQ ID NO: 167370 - protein, 10 aa, Homo Sapiens
YSYLHGMEIL

SEQ ID NO: 167371 - protein, 10 aa, Homo Sapiens
YTIENPRHFV

SEQ ID NO: 167372 - protein, 10 aa, Homo Sapiens
YTNGHLFTTI

SEQ ID NO: 167373 - protein, 11 aa, Homo Sapiens
AAFHPTMPLIV

SEQ ID NO: 167374 - protein, 11 aa, Homo Sapiens
AAIDARIFHEL

SEQ ID NO: 167375 - protein, 11 aa, Homo Sapiens
ADREDDPNFFK

SEQ ID NO: 167376 - protein, 11 aa, Homo Sapiens
ADVDQDGRVNY

SEQ ID NO: 167377 - protein, 11 aa, Homo Sapiens
AEVNADRITWL

SEQ ID NO: 167378 - protein, 11 aa, Homo Sapiens
ANMPWFKGWKV

SEQ ID NO: 167379 - protein, 11 aa, Homo Sapiens
ANSPWVVQLFY

SEQ ID NO: 167380 - protein, 11 aa, Homo Sapiens
DAGAGIALNDH

SEQ ID NO: 167381 - protein, 11 aa, Homo Sapiens
DINTDGAVNFQ

SEQ ID NO: 167382 - protein, 11 aa, Homo Sapiens
DLAGRDLTDYL

SEQ ID NO: 167383 - protein, 11 aa, Homo Sapiens
DLDTNADKQLS

SEQ ID NO: 167384 - protein, 11 aa, Homo Sapiens
DPAAASHPLLL

SEQ ID NO: 167385 - protein, 11 aa, Homo Sapiens
DTNADKQLSFE

SEQ ID NO: 167386 - protein, 11 aa, Homo Sapiens
FLTAAKKARAG

SEQ ID NO: 167387 - protein, 11 aa, Homo Sapiens
FSIDRALNVAL

SEQ ID NO: 167388 - protein, 11 aa, Homo Sapiens
FSRATALDNVV

SEQ ID NO: 167389 - protein, 11 aa, Homo Sapiens
FTIKDRNGKEV

SEQ ID NO: 167390 - protein, 11 aa, Homo Sapiens
FVAPFPEVFGK

SEQ ID NO: 167391 - protein, 11 aa, Homo Sapiens
GVSVDSQFTHL

SEQ ID NO: 167392 - protein, 11 aa, Homo Sapiens
HANPILLLVMY

SEQ ID NO: 167393 - protein, 11 aa, Homo Sapiens
HAVYRDDLKKL

SEQ ID NO: 167394 - protein, 11 aa, Homo Sapiens
HISDEISIMTL

SEQ ID NO: 167395 - protein, 11 aa, Homo Sapiens
HNMPPSALSQL

SEQ ID NO: 167396 - protein, 11 aa, Homo Sapiens
HTYDFKKLAEV

SEQ ID NO: 167397 - protein, 11 aa, Homo Sapiens
ISSHIPLIIQF

SEQ ID NO: 167398 - protein, 11 aa, Homo Sapiens
ISSVLISIQSL

SEQ ID NO: 167399 - protein, 11 aa, Homo Sapiens
KAMLAKLMSEL

SEQ ID NO: 167400 - protein, 11 aa, Homo Sapiens
KAMLAQLLAEL

SEQ ID NO: 167401 - protein, 11 aa, Homo Sapiens
KAVDSQILPKI

SEQ ID NO: 167402 - protein, 11 aa, Homo Sapiens
KGFSWSSSLII

SEQ ID NO: 167403 - protein, 11 aa, Homo Sapiens
KLNPQQFEVLF

SEQ ID NO: 167404 - protein, 11 aa, Homo Sapiens
KMDQGSIERIL

SEQ ID NO: 167405 - protein, 11 aa, Homo Sapiens
KNFISEPARTV

SEQ ID NO: 167406 - protein, 11 aa, Homo Sapiens
KQSIIRLQSLC

SEQ ID NO: 167407 - protein, 11 aa, Homo Sapiens
KSFEQVSGVTV

SEQ ID NO: 167408 - protein, 11 aa, Homo Sapiens
KSFFDNISSEL

SEQ ID NO: 167409 - protein, 11 aa, Homo Sapiens
KSIPASDLPQV

SEQ ID NO: 167410 - protein, 11 aa, Homo Sapiens
KSKSPAIFGVL

SEQ ID NO: 167411 - protein, 11 aa, Homo Sapiens
KSLDAIVASVM

SEQ ID NO: 167412 - protein, 11 aa, Homo Sapiens
KSLPASLSFLV

SEQ ID NO: 167413 - protein, 11 aa, Homo Sapiens
KSYEPLEDPGV

SEQ ID NO: 167414 - protein, 11 aa, Homo Sapiens
KTIDIAQEEVL

SEQ ID NO: 167415 - protein, 11 aa, Homo Sapiens
KTIVPATLPQL

SEQ ID NO: 167416 - protein, 11 aa, Homo Sapiens
KTNDQMVVVYL

SEQ ID NO: 167417 - protein, 11 aa, Homo Sapiens
KTNHVFFLLLL

SEQ ID NO: 167418 - protein, 11 aa, Homo Sapiens
KTNTKLGKLYL

SEQ ID NO: 167419 - protein, 11 aa, Homo Sapiens
KTYDTSFLDFL

SEQ ID NO: 167420 - protein, 11 aa, Homo Sapiens
KTYDYLFKLLL

SEQ ID NO: 167421 - protein, 11 aa, Homo Sapiens
KVLEPSETLVV

SEQ ID NO: 167422 - protein, 11 aa, Homo Sapiens
KVNTALTALYL

SEQ ID NO: 167423 - protein, 11 aa, Homo Sapiens
LDTNADKQLSF

SEQ ID NO: 167424 - protein, 11 aa, Homo Sapiens
LRVAPEEHPVL

SEQ ID NO: 167425 - protein, 11 aa, Homo Sapiens
LSNAKHLEILF

SEQ ID NO: 167426 - protein, 11 aa, Homo Sapiens
LSPSMGHPLEV

SEQ ID NO: 167427 - protein, 11 aa, Homo Sapiens
LSRYEDTWAAL

SEQ ID NO: 167428 - protein, 11 aa, Homo Sapiens
LTAAKKARAGL

SEQ ID NO: 167429 - protein, 11 aa, Homo Sapiens
LTAPPEALLMV

SEQ ID NO: 167430 - protein, 11 aa, Homo Sapiens
PIYPGHGMMFV

SEQ ID NO: 167431 - protein, 11 aa, Homo Sapiens
PKFEVIEKPQA

SEQ ID NO: 167432 - protein, 11 aa, Homo Sapiens
QEFLTAAKKAR

SEQ ID NO: 167433 - protein, 11 aa, Homo Sapiens
QSIPYQDLPHL

SEQ ID NO: 167434 - protein, 11 aa, Homo Sapiens
QSIYPLHDVFV

SEQ ID NO: 167435 - protein, 11 aa, Homo Sapiens
RAIEALHGHEL

SEQ ID NO: 167436 - protein, 11 aa, Homo Sapiens
RARDARVVGLL

SEQ ID NO: 167437 - protein, 11 aa, Homo Sapiens
RASEALSFNEV

SEQ ID NO: 167438 - protein, 11 aa, Homo Sapiens
RELEELNVPGE

SEQ ID NO: 167439 - protein, 11 aa, Homo Sapiens
RIAEALSKMKL

SEQ ID NO: 167440 - protein, 11 aa, Homo Sapiens
RIIEPRKGTVV

SEQ ID NO: 167441 - protein, 11 aa, Homo Sapiens
RNFFSNMFSSV

SEQ ID NO: 167442 - protein, 11 aa, Homo Sapiens
RNINPDVLFEV

SEQ ID NO: 167443 - protein, 11 aa, Homo Sapiens
RNSAELTVIKV

SEQ ID NO: 167444 - protein, 11 aa, Homo Sapiens
RSFDKGPFATF

SEQ ID NO: 167445 - protein, 11 aa, Homo Sapiens
RSFDSNAFTLL

SEQ ID NO: 167446 - protein, 11 aa, Homo Sapiens
RSFFSEIISSI

SEQ ID NO: 167447 - protein, 11 aa, Homo Sapiens
RSLPAELGNMV

SEQ ID NO: 167448 - protein, 11 aa, Homo Sapiens
RSNDGAYSLVL

SEQ ID NO: 167449 - protein, 11 aa, Homo Sapiens
RSNLEISKMEV

SEQ ID NO: 167450 - protein, 11 aa, Homo Sapiens
RSNPKLKDLYI

SEQ ID NO: 167451 - protein, 11 aa, Homo Sapiens
RSRNTDEMVEL

SEQ ID NO: 167452 - protein, 11 aa, Homo Sapiens
RSSEAVIWEVL

SEQ ID NO: 167453 - protein, 11 aa, Homo Sapiens
RSSRSHAVLLV

SEQ ID NO: 167454 - protein, 11 aa, Homo Sapiens
RSVDVTNTTFL

SEQ ID NO: 167455 - protein, 11 aa, Homo Sapiens
RSYLFLGGILM

SEQ ID NO: 167456 - protein, 11 aa, Homo Sapiens
RSYNRFQIATV

SEQ ID NO: 167457 - protein, 11 aa, Homo Sapiens
RTNASISVLEV

SEQ ID NO: 167458 - protein, 11 aa, Homo Sapiens
RTNPQVLDTGL

SEQ ID NO: 167459 - protein, 11 aa, Homo Sapiens
RTQFEETWATL

SEQ ID NO: 167460 - protein, 11 aa, Homo Sapiens
RTSDDVAKEFV

SEQ ID NO: 167461 - protein, 11 aa, Homo Sapiens
RTSVKISYIGL

SEQ ID NO: 167462 - protein, 11 aa, Homo Sapiens
RVFEQGGARVV

SEQ ID NO: 167463 - protein, 11 aa, Homo Sapiens
RVLHEVEPRYV

SEQ ID NO: 167464 - protein, 11 aa, Homo Sapiens
RVMAPRTLILL

SEQ ID NO: 167465 - protein, 11 aa, Homo Sapiens
RVYQPVRYYYV

SEQ ID NO: 167466 - protein, 11 aa, Homo Sapiens
TSFYDRVWAAI

SEQ ID NO: 167467 - protein, 11 aa, Homo Sapiens
VSCPYSADMYV

SEQ ID NO: 167468 - protein, 11 aa, Homo Sapiens
VSFPFGKIGTV

SEQ ID NO: 167469 - protein, 11 aa, Homo Sapiens
VSYFPDKVALL

SEQ ID NO: 167470 - protein, 11 aa, Homo Sapiens
VTALLGRLAEL

SEQ ID NO: 167471 - protein, 11 aa, Homo Sapiens
YGAEALERMFL

SEQ ID NO: 167472 - protein, 11 aa, Homo Sapiens
YSLSSADLSSL

SEQ ID NO: 167473 - protein, 11 aa, Homo Sapiens
YSMLAIGIGTL

SEQ ID NO: 167474 - protein, 11 aa, Homo Sapiens
YSSLPASKQML

SEQ ID NO: 167475 - protein, 11 aa, Homo Sapiens
YTTDRVMTVSF

SEQ ID NO: 167476 - protein, 8 aa, Homo Sapiens
AAAAPRLW

SEQ ID NO: 167477 - protein, 8 aa, Homo Sapiens
AAAAQIRY

SEQ ID NO: 167478 - protein, 8 aa, Homo Sapiens
AAAERMIL

SEQ ID NO: 167479 - protein, 8 aa, Homo Sapiens
AAALHYAL

SEQ ID NO: 167480 - protein, 8 aa, Homo Sapiens
AAALRQAL

SEQ ID NO: 167481 - protein, 8 aa, Homo Sapiens
AAALRVEL

SEQ ID NO: 167482 - protein, 8 aa, Homo Sapiens
AAAPPLTL

SEQ ID NO: 167483 - protein, 8 aa, Homo Sapiens
AAAQLPSL

SEQ ID NO: 167484 - protein, 8 aa, Homo Sapiens
AAATHLEV

SEQ ID NO: 167485 - protein, 8 aa, Homo Sapiens
AAAVGLEL

SEQ ID NO: 167486 - protein, 8 aa, Homo Sapiens
AAAVLFRM

SEQ ID NO: 167487 - protein, 8 aa, Homo Sapiens
AAAVRHVL

SEQ ID NO: 167488 - protein, 8 aa, Homo Sapiens
AAAVRITL

SEQ ID NO: 167489 - protein, 8 aa, Homo Sapiens
AAAWPLLL

SEQ ID NO: 167490 - protein, 8 aa, Homo Sapiens
AAAYRVTL

SEQ ID NO: 167491 - protein, 8 aa, Homo Sapiens
AAFNIIEV

SEQ ID NO: 167492 - protein, 8 aa, Homo Sapiens
AALVGFLY

SEQ ID NO: 167493 - protein, 8 aa, Homo Sapiens
AAMILNEL

SEQ ID NO: 167494 - protein, 8 aa, Homo Sapiens
AANIQPIF

SEQ ID NO: 167495 - protein, 8 aa, Homo Sapiens
AANLRETF

SEQ ID NO: 167496 - protein, 8 aa, Homo Sapiens
AANVIPVL

SEQ ID NO: 167497 - protein, 8 aa, Homo Sapiens
AANVRELM

SEQ ID NO: 167498 - protein, 8 aa, Homo Sapiens
AARQPIEL

SEQ ID NO: 167499 - protein, 8 aa, Homo Sapiens
AASALPAL

SEQ ID NO: 167500 - protein, 8 aa, Homo Sapiens
AASFRPGL

SEQ ID NO: 167501 - protein, 8 aa, Homo Sapiens
AASLLPVL

SEQ ID NO: 167502 - protein, 8 aa, Homo Sapiens
AASLRLTL

SEQ ID NO: 167503 - protein, 8 aa, Homo Sapiens
AASLRQEL

SEQ ID NO: 167504 - protein, 8 aa, Homo Sapiens
AASVRPVL

SEQ ID NO: 167505 - protein, 8 aa, Homo Sapiens
AATIRLIF

SEQ ID NO: 167506 - protein, 8 aa, Homo Sapiens
AFKNRMEV

SEQ ID NO: 167507 - protein, 8 aa, Homo Sapiens
AFNLRISF

SEQ ID NO: 167508 - protein, 8 aa, Homo Sapiens
AFVTGYDI

SEQ ID NO: 167509 - protein, 8 aa, Homo Sapiens
AISHGRVF

SEQ ID NO: 167510 - protein, 8 aa, Homo Sapiens
AQSFRPAM

SEQ ID NO: 167511 - protein, 8 aa, Homo Sapiens
ASFNRMVM

SEQ ID NO: 167512 - protein, 8 aa, Homo Sapiens
ASGLIHRV

SEQ ID NO: 167513 - protein, 8 aa, Homo Sapiens
ASLRKVSM

SEQ ID NO: 167514 - protein, 8 aa, Homo Sapiens
ASLVHLSL

SEQ ID NO: 167515 - protein, 8 aa, Homo Sapiens
ASNTRLQL

SEQ ID NO: 167516 - protein, 8 aa, Homo Sapiens
ASRVIREL

SEQ ID NO: 167517 - protein, 8 aa, Homo Sapiens
ASTTRISL

SEQ ID NO: 167518 - protein, 8 aa, Homo Sapiens
ATKLERVF

SEQ ID NO: 167519 - protein, 8 aa, Homo Sapiens
ATRWAKKI

SEQ ID NO: 167520 - protein, 8 aa, Homo Sapiens
CAALRMLL

SEQ ID NO: 167521 - protein, 8 aa, Homo Sapiens
CAQVLPYL

SEQ ID NO: 167522 - protein, 8 aa, Homo Sapiens
CASINRIY

SEQ ID NO: 167523 - protein, 8 aa, Homo Sapiens
CCTLKIEY

SEQ ID NO: 167524 - protein, 8 aa, Homo Sapiens
CSAIRESY

SEQ ID NO: 167525 - protein, 8 aa, Homo Sapiens
DELRDEGK

SEQ ID NO: 167526 - protein, 8 aa, Homo Sapiens
DLMNLSEK

SEQ ID NO: 167527 - protein, 8 aa, Homo Sapiens
DVSSALDK

SEQ ID NO: 167528 - protein, 8 aa, Homo Sapiens
ELGFRPEY

SEQ ID NO: 167529 - protein, 8 aa, Homo Sapiens
FAAEAIAL

SEQ ID NO: 167530 - protein, 8 aa, Homo Sapiens
FAAEAIAM

SEQ ID NO: 167531 - protein, 8 aa, Homo Sapiens
FAAEHTIF

SEQ ID NO: 167532 - protein, 8 aa, Homo Sapiens
FAAKQREL

SEQ ID NO: 167533 - protein, 8 aa, Homo Sapiens
FAALQLEY

SEQ ID NO: 167534 - protein, 8 aa, Homo Sapiens
FAASGLEF

SEQ ID NO: 167535 - protein, 8 aa, Homo Sapiens
FAAVIQAL

SEQ ID NO: 167536 - protein, 8 aa, Homo Sapiens
FAAVKLFL

SEQ ID NO: 167537 - protein, 8 aa, Homo Sapiens
FAAYGNVF

SEQ ID NO: 167538 - protein, 8 aa, Homo Sapiens
FAFSHEQL

SEQ ID NO: 167539 - protein, 8 aa, Homo Sapiens
FAFSRQAL

SEQ ID NO: 167540 - protein, 8 aa, Homo Sapiens
FAFVEFEL

SEQ ID NO: 167541 - protein, 8 aa, Homo Sapiens
FAFVEYEV

SEQ ID NO: 167542 - protein, 8 aa, Homo Sapiens
FAFVHISF

SEQ ID NO: 167543 - protein, 8 aa, Homo Sapiens
FAGLVPRL

SEQ ID NO: 167544 - protein, 8 aa, Homo Sapiens
FAGQGIVY

SEQ ID NO: 167545 - protein, 8 aa, Homo Sapiens
FAGQMAAL

SEQ ID NO: 167546 - protein, 8 aa, Homo Sapiens
FAGSILAV

SEQ ID NO: 167547 - protein, 8 aa, Homo Sapiens
FAGWGRAL

SEQ ID NO: 167548 - protein, 8 aa, Homo Sapiens
FAHIQAVF

SEQ ID NO: 167549 - protein, 8 aa, Homo Sapiens
FAHWGQEL

SEQ ID NO: 167550 - protein, 8 aa, Homo Sapiens
FAIYKMSF

SEQ ID NO: 167551 - protein, 8 aa, Homo Sapiens
FALEHLEM

SEQ ID NO: 167552 - protein, 8 aa, Homo Sapiens
FALNHPEL

SEQ ID NO: 167553 - protein, 8 aa, Homo Sapiens
FALVMQQL

SEQ ID NO: 167554 - protein, 8 aa, Homo Sapiens
FALVSQAY

SEQ ID NO: 167555 - protein, 8 aa, Homo Sapiens
FALYRQAY

SEQ ID NO: 167556 - protein, 8 aa, Homo Sapiens
FAMIIDKL

SEQ ID NO: 167557 - protein, 8 aa, Homo Sapiens
FAMNGKSF

SEQ ID NO: 167558 - protein, 8 aa, Homo Sapiens
FAMVHVAY

SEQ ID NO: 167559 - protein, 8 aa, Homo Sapiens
FAMVKGYF

SEQ ID NO: 167560 - protein, 8 aa, Homo Sapiens
FANYIDKV

SEQ ID NO: 167561 - protein, 8 aa, Homo Sapiens
FAQFGHVR

SEQ ID NO: 167562 - protein, 8 aa, Homo Sapiens
FAQIALQL

SEQ ID NO: 167563 - protein, 8 aa, Homo Sapiens
FAQPAFML

SEQ ID NO: 167564 - protein, 8 aa, Homo Sapiens
FARIAIEV

SEQ ID NO: 167565 - protein, 8 aa, Homo Sapiens
FARLPLVV

SEQ ID NO: 167566 - protein, 8 aa, Homo Sapiens
FASFSDYY

SEQ ID NO: 167567 - protein, 8 aa, Homo Sapiens
FASLQPSL

SEQ ID NO: 167568 - protein, 8 aa, Homo Sapiens
FASNHIQL

SEQ ID NO: 167569 - protein, 8 aa, Homo Sapiens
FASNLPTL

SEQ ID NO: 167570 - protein, 8 aa, Homo Sapiens
FASPGRLF

SEQ ID NO: 167571 - protein, 8 aa, Homo Sapiens
FASTHLIL

SEQ ID NO: 167572 - protein, 8 aa, Homo Sapiens
FATFKMQY

SEQ ID NO: 167573 - protein, 8 aa, Homo Sapiens
FATILVEY

SEQ ID NO: 167574 - protein, 8 aa, Homo Sapiens
FATLQNEL

SEQ ID NO: 167575 - protein, 8 aa, Homo Sapiens
FATNGFTY

SEQ ID NO: 167576 - protein, 8 aa, Homo Sapiens
FATVRETL

SEQ ID NO: 167577 - protein, 8 aa, Homo Sapiens
FAVALPQL

SEQ ID NO: 167578 - protein, 8 aa, Homo Sapiens
FAVDPRFL

SEQ ID NO: 167579 - protein, 8 aa, Homo Sapiens
FAVIKEAF

SEQ ID NO: 167580 - protein, 8 aa, Homo Sapiens
FAVLPRLL

SEQ ID NO: 167581 - protein, 8 aa, Homo Sapiens
FAVTGYDL

SEQ ID NO: 167582 - protein, 8 aa, Homo Sapiens
FAWGHDEL

SEQ ID NO: 167583 - protein, 8 aa, Homo Sapiens
FAYLGRLA

SEQ ID NO: 167584 - protein, 8 aa, Homo Sapiens
FAYLRDLL

SEQ ID NO: 167585 - protein, 8 aa, Homo Sapiens
FCSLPRKY

SEQ ID NO: 167586 - protein, 8 aa, Homo Sapiens
FFAERLYY

SEQ ID NO: 167587 - protein, 8 aa, Homo Sapiens
FFENHPYF

SEQ ID NO: 167588 - protein, 8 aa, Homo Sapiens
FFFSHVGW

SEQ ID NO: 167589 - protein, 8 aa, Homo Sapiens
FFFSRLEY

SEQ ID NO: 167590 - protein, 8 aa, Homo Sapiens
FFKDRHWL

SEQ ID NO: 167591 - protein, 8 aa, Homo Sapiens
FFKDRNWL

SEQ ID NO: 167592 - protein, 8 aa, Homo Sapiens
FFLLRIHF

SEQ ID NO: 167593 - protein, 8 aa, Homo Sapiens
FFQIRDDY

SEQ ID NO: 167594 - protein, 8 aa, Homo Sapiens
FGADARAL

SEQ ID NO: 167595 - protein, 8 aa, Homo Sapiens
FGGKRLSL

SEQ ID NO: 167596 - protein, 8 aa, Homo Sapiens
FGGQRLTL

SEQ ID NO: 167597 - protein, 8 aa, Homo Sapiens
FGNLRPVL

SEQ ID NO: 167598 - protein, 8 aa, Homo Sapiens
FGNYRPFL

SEQ ID NO: 167599 - protein, 8 aa, Homo Sapiens
FGTIRDSL

SEQ ID NO: 167600 - protein, 8 aa, Homo Sapiens
FIRDPLTL

SEQ ID NO: 167601 - protein, 8 aa, Homo Sapiens
FITEIPEL

SEQ ID NO: 167602 - protein, 8 aa, Homo Sapiens
FITNPRTL

SEQ ID NO: 167603 - protein, 8 aa, Homo Sapiens
FNFVGKIL

SEQ ID NO: 167604 - protein, 8 aa, Homo Sapiens
FNSVRSVF

SEQ ID NO: 167605 - protein, 8 aa, Homo Sapiens
FSAHRIVL

SEQ ID NO: 167606 - protein, 8 aa, Homo Sapiens
FSANPKEL

SEQ ID NO: 167607 - protein, 8 aa, Homo Sapiens
FSASHRLY

SEQ ID NO: 167608 - protein, 8 aa, Homo Sapiens
FSATPRYM

SEQ ID NO: 167609 - protein, 8 aa, Homo Sapiens
FSAVREDF

SEQ ID NO: 167610 - protein, 8 aa, Homo Sapiens
FSCVKNEL

SEQ ID NO: 167611 - protein, 8 aa, Homo Sapiens
FSDVLPVL

SEQ ID NO: 167612 - protein, 8 aa, Homo Sapiens
FSFQRPLL

SEQ ID NO: 167613 - protein, 8 aa, Homo Sapiens
FSFVMPSL

SEQ ID NO: 167614 - protein, 8 aa, Homo Sapiens
FSHLQPTL

SEQ ID NO: 167615 - protein, 8 aa, Homo Sapiens
FSHWTYEY

SEQ ID NO: 167616 - protein, 8 aa, Homo Sapiens
FSINGHFY

SEQ ID NO: 167617 - protein, 8 aa, Homo Sapiens
FSIVMNEL

SEQ ID NO: 167618 - protein, 8 aa, Homo Sapiens
FSMEALEL

SEQ ID NO: 167619 - protein, 8 aa, Homo Sapiens
FSMVGLYY

SEQ ID NO: 167620 - protein, 8 aa, Homo Sapiens
FSNIREEL

SEQ ID NO: 167621 - protein, 8 aa, Homo Sapiens
FSPTGEIL

SEQ ID NO: 167622 - protein, 8 aa, Homo Sapiens
FSPVGSVL

SEQ ID NO: 167623 - protein, 8 aa, Homo Sapiens
FSQIQPKL

SEQ ID NO: 167624 - protein, 8 aa, Homo Sapiens
FSSERIDW

SEQ ID NO: 167625 - protein, 8 aa, Homo Sapiens
FSSLHTVF

SEQ ID NO: 167626 - protein, 8 aa, Homo Sapiens
FSSNPISL

SEQ ID NO: 167627 - protein, 8 aa, Homo Sapiens
FSSTKEEF

SEQ ID NO: 167628 - protein, 8 aa, Homo Sapiens
FSSVGEEF

SEQ ID NO: 167629 - protein, 8 aa, Homo Sapiens
FSTTKPLF

SEQ ID NO: 167630 - protein, 8 aa, Homo Sapiens
FSTVHEKF

SEQ ID NO: 167631 - protein, 8 aa, Homo Sapiens
FSTVRKEM

SEQ ID NO: 167632 - protein, 8 aa, Homo Sapiens
FSVLQHVL

SEQ ID NO: 167633 - protein, 8 aa, Homo Sapiens
FSVTGRVL

SEQ ID NO: 167634 - protein, 8 aa, Homo Sapiens
FSWIRNTL

SEQ ID NO: 167635 - protein, 8 aa, Homo Sapiens
FSYAGFEM

SEQ ID NO: 167636 - protein, 8 aa, Homo Sapiens
FTADPLSL

SEQ ID NO: 167637 - protein, 8 aa, Homo Sapiens
FTAFKEEY

SEQ ID NO: 167638 - protein, 8 aa, Homo Sapiens
FTATQPEV

SEQ ID NO: 167639 - protein, 8 aa, Homo Sapiens
FTFTRVEL

SEQ ID NO: 167640 - protein, 8 aa, Homo Sapiens
FTIIREEF

SEQ ID NO: 167641 - protein, 8 aa, Homo Sapiens
FTMVGKTF

SEQ ID NO: 167642 - protein, 8 aa, Homo Sapiens
FTSEPRLI

SEQ ID NO: 167643 - protein, 8 aa, Homo Sapiens
FTSSRLFF

SEQ ID NO: 167644 - protein, 8 aa, Homo Sapiens
FTTLKPEL

SEQ ID NO: 167645 - protein, 8 aa, Homo Sapiens
FVEVGRLG

SEQ ID NO: 167646 - protein, 8 aa, Homo Sapiens
FVGFQPVL

SEQ ID NO: 167647 - protein, 8 aa, Homo Sapiens
FVGLRLEL

SEQ ID NO: 167648 - protein, 8 aa, Homo Sapiens
FWFFREAF

SEQ ID NO: 167649 - protein, 8 aa, Homo Sapiens
FWKEHPEI

SEQ ID NO: 167650 - protein, 8 aa, Homo Sapiens
FWMTRQEY

SEQ ID NO: 167651 - protein, 8 aa, Homo Sapiens
FYVEHPEV

SEQ ID NO: 167652 - protein, 8 aa, Homo Sapiens
GGYAEVGR

SEQ ID NO: 167653 - protein, 8 aa, Homo Sapiens
GKEAFAPL

SEQ ID NO: 167654 - protein, 8 aa, Homo Sapiens
HFGIHEEM

SEQ ID NO: 167655 - protein, 8 aa, Homo Sapiens
HFNTRLSF

SEQ ID NO: 167656 - protein, 8 aa, Homo Sapiens
HGPGLIYR

SEQ ID NO: 167657 - protein, 8 aa, Homo Sapiens
HGWLRPEM

SEQ ID NO: 167658 - protein, 8 aa, Homo Sapiens
HSAERLAL

SEQ ID NO: 167659 - protein, 8 aa, Homo Sapiens
HSFFKISY

SEQ ID NO: 167660 - protein, 8 aa, Homo Sapiens
HWLVGMVY

SEQ ID NO: 167661 - protein, 8 aa, Homo Sapiens
IAAIPRLI

SEQ ID NO: 167662 - protein, 8 aa, Homo Sapiens
IAHLRQIL

SEQ ID NO: 167663 - protein, 8 aa, Homo Sapiens
IAHVLPAL

SEQ ID NO: 167664 - protein, 8 aa, Homo Sapiens
IALEHPML

SEQ ID NO: 167665 - protein, 8 aa, Homo Sapiens
IALLLPQL

SEQ ID NO: 167666 - protein, 8 aa, Homo Sapiens
IALTRAEM

SEQ ID NO: 167667 - protein, 8 aa, Homo Sapiens
IAMQLPVL

SEQ ID NO: 167668 - protein, 8 aa, Homo Sapiens
IANYRPTL

SEQ ID NO: 167669 - protein, 8 aa, Homo Sapiens
IASQGREL

SEQ ID NO: 167670 - protein, 8 aa, Homo Sapiens
IFKERESF

SEQ ID NO: 167671 - protein, 8 aa, Homo Sapiens
IFSQKPEF

SEQ ID NO: 167672 - protein, 8 aa, Homo Sapiens
IGIVQPEL

SEQ ID NO: 167673 - protein, 8 aa, Homo Sapiens
IMMNTPVI

SEQ ID NO: 167674 - protein, 8 aa, Homo Sapiens
IMTFRPTM

SEQ ID NO: 167675 - protein, 8 aa, Homo Sapiens
IQSIRMGM

SEQ ID NO: 167676 - protein, 8 aa, Homo Sapiens
ISAVRPVI

SEQ ID NO: 167677 - protein, 8 aa, Homo Sapiens
ISLEGKPL

SEQ ID NO: 167678 - protein, 8 aa, Homo Sapiens
ISLVGFVL

SEQ ID NO: 167679 - protein, 8 aa, Homo Sapiens
ISMEVPVM

SEQ ID NO: 167680 - protein, 8 aa, Homo Sapiens
ISQIQPEV

SEQ ID NO: 167681 - protein, 8 aa, Homo Sapiens
ISQVGRVY

SEQ ID NO: 167682 - protein, 8 aa, Homo Sapiens
ISTLKTEF

SEQ ID NO: 167683 - protein, 8 aa, Homo Sapiens
ISTWKPEM

SEQ ID NO: 167684 - protein, 8 aa, Homo Sapiens
ISVEGREF

SEQ ID NO: 167685 - protein, 8 aa, Homo Sapiens
ISVKGRIY

SEQ ID NO: 167686 - protein, 8 aa, Homo Sapiens
ITNIRPSF

SEQ ID NO: 167687 - protein, 8 aa, Homo Sapiens
ITTLRQVL

SEQ ID NO: 167688 - protein, 8 aa, Homo Sapiens
KAFIHHEL

SEQ ID NO: 167689 - protein, 8 aa, Homo Sapiens
KALDGFVM

SEQ ID NO: 167690 - protein, 8 aa, Homo Sapiens
KALTHLEM

SEQ ID NO: 167691 - protein, 8 aa, Homo Sapiens
KARLPLRL

SEQ ID NO: 167692 - protein, 8 aa, Homo Sapiens
KFHLRPEL

SEQ ID NO: 167693 - protein, 8 aa, Homo Sapiens
KLVTDLTK

SEQ ID NO: 167694 - protein, 8 aa, Homo Sapiens
KNSIRLTL

SEQ ID NO: 167695 - protein, 8 aa, Homo Sapiens
KSTIKFQM

SEQ ID NO: 167696 - protein, 8 aa, Homo Sapiens
LAAEPRLL

SEQ ID NO: 167697 - protein, 8 aa, Homo Sapiens
LAAHRELL

SEQ ID NO: 167698 - protein, 8 aa, Homo Sapiens
LAAIKNAM

SEQ ID NO: 167699 - protein, 8 aa, Homo Sapiens
LAAVRLWL

SEQ ID NO: 167700 - protein, 8 aa, Homo Sapiens
LAGKVLAL

SEQ ID NO: 167701 - protein, 8 aa, Homo Sapiens
LAGPALEL

SEQ ID NO: 167702 - protein, 8 aa, Homo Sapiens
LAKVGIAL

SEQ ID NO: 167703 - protein, 8 aa, Homo Sapiens
LAMVSLEM

SEQ ID NO: 167704 - protein, 8 aa, Homo Sapiens
LANLRPLL

SEQ ID NO: 167705 - protein, 8 aa, Homo Sapiens
LAQLQQEF

SEQ ID NO: 167706 - protein, 8 aa, Homo Sapiens
LASFIPAV

SEQ ID NO: 167707 - protein, 8 aa, Homo Sapiens
LASWGHEY

SEQ ID NO: 167708 - protein, 8 aa, Homo Sapiens
LFQSRISL

SEQ ID NO: 167709 - protein, 8 aa, Homo Sapiens
LFQTRQEM

SEQ ID NO: 167710 - protein, 8 aa, Homo Sapiens
LFTFRPAL

SEQ ID NO: 167711 - protein, 8 aa, Homo Sapiens
LFVQRPEF

SEQ ID NO: 167712 - protein, 8 aa, Homo Sapiens
LGGHLDAK

SEQ ID NO: 167713 - protein, 8 aa, Homo Sapiens
LGNVRPLL

SEQ ID NO: 167714 - protein, 8 aa, Homo Sapiens
LIVTQTMK

SEQ ID NO: 167715 - protein, 8 aa, Homo Sapiens
LQAQRLVM

SEQ ID NO: 167716 - protein, 8 aa, Homo Sapiens
LQQPRPLM

SEQ ID NO: 167717 - protein, 8 aa, Homo Sapiens
LSAIQSEV

SEQ ID NO: 167718 - protein, 8 aa, Homo Sapiens
LSAPARLY

SEQ ID NO: 167719 - protein, 8 aa, Homo Sapiens
LSLERPTM

SEQ ID NO: 167720 - protein, 8 aa, Homo Sapiens
LSLLGHVY

SEQ ID NO: 167721 - protein, 8 aa, Homo Sapiens
LSMEILEV

SEQ ID NO: 167722 - protein, 8 aa, Homo Sapiens
LSSIRHMI

SEQ ID NO: 167723 - protein, 8 aa, Homo Sapiens
LSSLRFVF

SEQ ID NO: 167724 - protein, 8 aa, Homo Sapiens
LSSLRPSL

SEQ ID NO: 167725 - protein, 8 aa, Homo Sapiens
LSSMRLPL

SEQ ID NO: 167726 - protein, 8 aa, Homo Sapiens
LSSVKLEY

SEQ ID NO: 167727 - protein, 8 aa, Homo Sapiens
LSTIRSFL

SEQ ID NO: 167728 - protein, 8 aa, Homo Sapiens
LSYSRISL

SEQ ID NO: 167729 - protein, 8 aa, Homo Sapiens
LTAFVVTL

SEQ ID NO: 167730 - protein, 8 aa, Homo Sapiens
LTAQPRLM

SEQ ID NO: 167731 - protein, 8 aa, Homo Sapiens
LTVLGQPK

SEQ ID NO: 167732 - protein, 8 aa, Homo Sapiens
LTVLSQPK

SEQ ID NO: 167733 - protein, 8 aa, Homo Sapiens
LVNEVTEF

SEQ ID NO: 167734 - protein, 8 aa, Homo Sapiens
LVTEVTKK

SEQ ID NO: 167735 - protein, 8 aa, Homo Sapiens
MAAYQLEL

SEQ ID NO: 167736 - protein, 8 aa, Homo Sapiens
MALLHLWV

SEQ ID NO: 167737 - protein, 8 aa, Homo Sapiens
MAMRIPVL

SEQ ID NO: 167738 - protein, 8 aa, Homo Sapiens
MASLLPQL

SEQ ID NO: 167739 - protein, 8 aa, Homo Sapiens
MATRVLSM

SEQ ID NO: 167740 - protein, 8 aa, Homo Sapiens
MFHNRHLF

SEQ ID NO: 167741 - protein, 8 aa, Homo Sapiens
MFHTRNSL

SEQ ID NO: 167742 - protein, 8 aa, Homo Sapiens
MFLTRSEY

SEQ ID NO: 167743 - protein, 8 aa, Homo Sapiens
MSMTGVSF

SEQ ID NO: 167744 - protein, 8 aa, Homo Sapiens
MSMVGYII

SEQ ID NO: 167745 - protein, 8 aa, Homo Sapiens
MSTCRLIL

SEQ ID NO: 167746 - protein, 8 aa, Homo Sapiens
MTAVRPAL

SEQ ID NO: 167747 - protein, 8 aa, Homo Sapiens
MTSFRLAL

SEQ ID NO: 167748 - protein, 8 aa, Homo Sapiens
MYSIITPN

SEQ ID NO: 167749 - protein, 8 aa, Homo Sapiens
NANNRLLL

SEQ ID NO: 167750 - protein, 8 aa, Homo Sapiens
NATIRNVL

SEQ ID NO: 167751 - protein, 8 aa, Homo Sapiens
NFAYRLEL

SEQ ID NO: 167752 - protein, 8 aa, Homo Sapiens
NFNTRFVM

SEQ ID NO: 167753 - protein, 8 aa, Homo Sapiens
NFYNRPIL

SEQ ID NO: 167754 - protein, 8 aa, Homo Sapiens
NIPVVSGK

SEQ ID NO: 167755 - protein, 8 aa, Homo Sapiens
NSAVLPEM

SEQ ID NO: 167756 - protein, 8 aa, Homo Sapiens
NSSIRPIF

SEQ ID NO: 167757 - protein, 8 aa, Homo Sapiens
NSSQRVEL

SEQ ID NO: 167758 - protein, 8 aa, Homo Sapiens
NSTNRVFF

SEQ ID NO: 167759 - protein, 8 aa, Homo Sapiens
PINGNGKQ

SEQ ID NO: 167760 - protein, 8 aa, Homo Sapiens
QATISFPK

SEQ ID NO: 167761 - protein, 8 aa, Homo Sapiens
QEAFDISK

SEQ ID NO: 167762 - protein, 8 aa, Homo Sapiens
QMAFQILL

SEQ ID NO: 167763 - protein, 8 aa, Homo Sapiens
QSWFRMVL

SEQ ID NO: 167764 - protein, 8 aa, Homo Sapiens
RAFVGFEY

SEQ ID NO: 167765 - protein, 8 aa, Homo Sapiens
RAFVHWYV

SEQ ID NO: 167766 - protein, 8 aa, Homo Sapiens
RAFVSMVY

SEQ ID NO: 167767 - protein, 8 aa, Homo Sapiens
RANERLEL

SEQ ID NO: 167768 - protein, 8 aa, Homo Sapiens
RANLRLTL

SEQ ID NO: 167769 - protein, 8 aa, Homo Sapiens
RARFALGL

SEQ ID NO: 167770 - protein, 8 aa, Homo Sapiens
RATIGRYF

SEQ ID NO: 167771 - protein, 8 aa, Homo Sapiens
RNMERLTL

SEQ ID NO: 167772 - protein, 8 aa, Homo Sapiens
RTALPRIF

SEQ ID NO: 167773 - protein, 8 aa, Homo Sapiens
RVTERFVM

SEQ ID NO: 167774 - protein, 8 aa, Homo Sapiens
SAACRLQL

SEQ ID NO: 167775 - protein, 8 aa, Homo Sapiens
SAALPRIL

SEQ ID NO: 167776 - protein, 8 aa, Homo Sapiens
SAALRAVY

SEQ ID NO: 167777 - protein, 8 aa, Homo Sapiens
SAFVFPQL

SEQ ID NO: 167778 - protein, 8 aa, Homo Sapiens
SAGEPRVL

SEQ ID NO: 167779 - protein, 8 aa, Homo Sapiens
SALEEYTK

SEQ ID NO: 167780 - protein, 8 aa, Homo Sapiens
SAMLQPLL

SEQ ID NO: 167781 - protein, 8 aa, Homo Sapiens
SAMVMFEL

SEQ ID NO: 167782 - protein, 8 aa, Homo Sapiens
SAQEIPVV

SEQ ID NO: 167783 - protein, 8 aa, Homo Sapiens
SAQLLPVL

SEQ ID NO: 167784 - protein, 8 aa, Homo Sapiens
SARRPLLL

SEQ ID NO: 167785 - protein, 8 aa, Homo Sapiens
SASFREEY

SEQ ID NO: 167786 - protein, 8 aa, Homo Sapiens
SASVLPEL

SEQ ID NO: 167787 - protein, 8 aa, Homo Sapiens
SASYKPVF

SEQ ID NO: 167788 - protein, 8 aa, Homo Sapiens
SATIRFVM

SEQ ID NO: 167789 - protein, 8 aa, Homo Sapiens
SATWPKEV

SEQ ID NO: 167790 - protein, 8 aa, Homo Sapiens
SFFTRSFF

SEQ ID NO: 167791 - protein, 8 aa, Homo Sapiens
SFMTHPEF

SEQ ID NO: 167792 - protein, 8 aa, Homo Sapiens
SGFVNPVL

SEQ ID NO: 167793 - protein, 8 aa, Homo Sapiens
SISERLEM

SEQ ID NO: 167794 - protein, 8 aa, Homo Sapiens
SIVHPSYN

SEQ ID NO: 167795 - protein, 8 aa, Homo Sapiens
SMAARVPI

SEQ ID NO: 167796 - protein, 8 aa, Homo Sapiens
SSGFRDFL

SEQ ID NO: 167797 - protein, 8 aa, Homo Sapiens
SSGLRFVL

SEQ ID NO: 167798 - protein, 8 aa, Homo Sapiens
SSHVERVF

SEQ ID NO: 167799 - protein, 8 aa, Homo Sapiens
SSLVHPEL

SEQ ID NO: 167800 - protein, 8 aa, Homo Sapiens
SSYVGLVY

SEQ ID NO: 167801 - protein, 8 aa, Homo Sapiens
TAAFPRML

SEQ ID NO: 167802 - protein, 8 aa, Homo Sapiens
TAAMGRVL

SEQ ID NO: 167803 - protein, 8 aa, Homo Sapiens
TAGLRPIL

SEQ ID NO: 167804 - protein, 8 aa, Homo Sapiens
TASLPREL

SEQ ID NO: 167805 - protein, 8 aa, Homo Sapiens
TATLRPYL

SEQ ID NO: 167806 - protein, 8 aa, Homo Sapiens
TFLNHPAL

SEQ ID NO: 167807 - protein, 8 aa, Homo Sapiens
TFLTRQAF

SEQ ID NO: 167808 - protein, 8 aa, Homo Sapiens
TFMNRVEV

SEQ ID NO: 167809 - protein, 8 aa, Homo Sapiens
TFTNHMVF

SEQ ID NO: 167810 - protein, 8 aa, Homo Sapiens
TGGFVLLY

SEQ ID NO: 167811 - protein, 8 aa, Homo Sapiens
TNFIKAEY

SEQ ID NO: 167812 - protein, 8 aa, Homo Sapiens
TNSVKLEM

SEQ ID NO: 167813 - protein, 8 aa, Homo Sapiens
TSLVHPVM

SEQ ID NO: 167814 - protein, 8 aa, Homo Sapiens
TSQLIPEM

SEQ ID NO: 167815 - protein, 8 aa, Homo Sapiens
TSTTRPVL

SEQ ID NO: 167816 - protein, 8 aa, Homo Sapiens
TTTFRPEL

SEQ ID NO: 167817 - protein, 8 aa, Homo Sapiens
TTWTRPIM

SEQ ID NO: 167818 - protein, 8 aa, Homo Sapiens
VAAEILEI

SEQ ID NO: 167819 - protein, 8 aa, Homo Sapiens
VAAIPRLL

SEQ ID NO: 167820 - protein, 8 aa, Homo Sapiens
VAAMARLL

SEQ ID NO: 167821 - protein, 8 aa, Homo Sapiens
VAAMQPRM

SEQ ID NO: 167822 - protein, 8 aa, Homo Sapiens
VAAVKWVM

SEQ ID NO: 167823 - protein, 8 aa, Homo Sapiens
VAFIRAEY

SEQ ID NO: 167824 - protein, 8 aa, Homo Sapiens
VAGFNPAL

SEQ ID NO: 167825 - protein, 8 aa, Homo Sapiens
VAGLQPVL

SEQ ID NO: 167826 - protein, 8 aa, Homo Sapiens
VALEHFVL

SEQ ID NO: 167827 - protein, 8 aa, Homo Sapiens
VALLQPFL

SEQ ID NO: 167828 - protein, 8 aa, Homo Sapiens
VALTHLTL

SEQ ID NO: 167829 - protein, 8 aa, Homo Sapiens
VALVHPDL

SEQ ID NO: 167830 - protein, 8 aa, Homo Sapiens
VAMVHPLL

SEQ ID NO: 167831 - protein, 8 aa, Homo Sapiens
VAQIRMAF

SEQ ID NO: 167832 - protein, 8 aa, Homo Sapiens
VAQLQFQL

SEQ ID NO: 167833 - protein, 8 aa, Homo Sapiens
VASEHFYF

SEQ ID NO: 167834 - protein, 8 aa, Homo Sapiens
VASFPRTV

SEQ ID NO: 167835 - protein, 8 aa, Homo Sapiens
VASIKTGF

SEQ ID NO: 167836 - protein, 8 aa, Homo Sapiens
VASMRLAY

SEQ ID NO: 167837 - protein, 8 aa, Homo Sapiens
VATEQPEL

SEQ ID NO: 167838 - protein, 8 aa, Homo Sapiens
VATFRLML

SEQ ID NO: 167839 - protein, 8 aa, Homo Sapiens
VATWMLEV

SEQ ID NO: 167840 - protein, 8 aa, Homo Sapiens
VAYHQPTL

SEQ ID NO: 167841 - protein, 8 aa, Homo Sapiens
VFFVHEGY

SEQ ID NO: 167842 - protein, 8 aa, Homo Sapiens
VFHPRQEL

SEQ ID NO: 167843 - protein, 8 aa, Homo Sapiens
VFKERIGY

SEQ ID NO: 167844 - protein, 8 aa, Homo Sapiens
VFMTHLEF

SEQ ID NO: 167845 - protein, 8 aa, Homo Sapiens
VGSFRQEY

SEQ ID NO: 167846 - protein, 8 aa, Homo Sapiens
VITNQPEI

SEQ ID NO: 167847 - protein, 8 aa, Homo Sapiens
VLAPTREL

SEQ ID NO: 167848 - protein, 8 aa, Homo Sapiens
VQSIRPPY

SEQ ID NO: 167849 - protein, 8 aa, Homo Sapiens
VSALEQRL

SEQ ID NO: 167850 - protein, 8 aa, Homo Sapiens
VSAYPRQL

SEQ ID NO: 167851 - protein, 8 aa, Homo Sapiens
VSHLQPLM

SEQ ID NO: 167852 - protein, 8 aa, Homo Sapiens
VSHLRLLP

SEQ ID NO: 167853 - protein, 8 aa, Homo Sapiens
VSHLRPLL

SEQ ID NO: 167854 - protein, 8 aa, Homo Sapiens
VSHTHLAF

SEQ ID NO: 167855 - protein, 8 aa, Homo Sapiens
VSLVQLTL

SEQ ID NO: 167856 - protein, 8 aa, Homo Sapiens
VSMLKQDY

SEQ ID NO: 167857 - protein, 8 aa, Homo Sapiens
VSNIRQVF

SEQ ID NO: 167858 - protein, 8 aa, Homo Sapiens
VSQVGKEL

SEQ ID NO: 167859 - protein, 8 aa, Homo Sapiens
VSSLRLAY

SEQ ID NO: 167860 - protein, 8 aa, Homo Sapiens
VSSLRMML

SEQ ID NO: 167861 - protein, 8 aa, Homo Sapiens
VTHIGRVY

SEQ ID NO: 167862 - protein, 8 aa, Homo Sapiens
VTQLRPIM

SEQ ID NO: 167863 - protein, 8 aa, Homo Sapiens
VTSILPVL

SEQ ID NO: 167864 - protein, 8 aa, Homo Sapiens
VTTVILEV

SEQ ID NO: 167865 - protein, 8 aa, Homo Sapiens
VVALSRTY

SEQ ID NO: 167866 - protein, 8 aa, Homo Sapiens
VVTFPRAY

SEQ ID NO: 167867 - protein, 8 aa, Homo Sapiens
WFNVRNGY

SEQ ID NO: 167868 - protein, 8 aa, Homo Sapiens
YAAIPREM

SEQ ID NO: 167869 - protein, 8 aa, Homo Sapiens
YAAIRDNY

SEQ ID NO: 167870 - protein, 8 aa, Homo Sapiens
YAALHGEF

SEQ ID NO: 167871 - protein, 8 aa, Homo Sapiens
YAALRELI

SEQ ID NO: 167872 - protein, 8 aa, Homo Sapiens
YAAQLPAL

SEQ ID NO: 167873 - protein, 8 aa, Homo Sapiens
YAAVTPEL

SEQ ID NO: 167874 - protein, 8 aa, Homo Sapiens
YAEGVRVL

SEQ ID NO: 167875 - protein, 8 aa, Homo Sapiens
YAFLHRTL

SEQ ID NO: 167876 - protein, 8 aa, Homo Sapiens
YAFLREAL

SEQ ID NO: 167877 - protein, 8 aa, Homo Sapiens
YAFSKLTY

SEQ ID NO: 167878 - protein, 8 aa, Homo Sapiens
YAGAILEV

SEQ ID NO: 167879 - protein, 8 aa, Homo Sapiens
YAGLQPYL

SEQ ID NO: 167880 - protein, 8 aa, Homo Sapiens
YAGTPRFF

SEQ ID NO: 167881 - protein, 8 aa, Homo Sapiens
YAIIKEEL

SEQ ID NO: 167882 - protein, 8 aa, Homo Sapiens
YAIIKFPL

SEQ ID NO: 167883 - protein, 8 aa, Homo Sapiens
YAIPQPDL

SEQ ID NO: 167884 - protein, 8 aa, Homo Sapiens
YAITRKAL

SEQ ID NO: 167885 - protein, 8 aa, Homo Sapiens
YAKLHPEM

SEQ ID NO: 167886 - protein, 8 aa, Homo Sapiens
YALETLTM

SEQ ID NO: 167887 - protein, 8 aa, Homo Sapiens
YALLGRTL

SEQ ID NO: 167888 - protein, 8 aa, Homo Sapiens
YALPHAIL

SEQ ID NO: 167889 - protein, 8 aa, Homo Sapiens
YALTVLEM

SEQ ID NO: 167890 - protein, 8 aa, Homo Sapiens
YAQFLREM

SEQ ID NO: 167891 - protein, 8 aa, Homo Sapiens
YASTGREF

SEQ ID NO: 167892 - protein, 8 aa, Homo Sapiens
YATYPREL

SEQ ID NO: 167893 - protein, 8 aa, Homo Sapiens
YAYLRDSL

SEQ ID NO: 167894 - protein, 8 aa, Homo Sapiens
YFDEHYEY

SEQ ID NO: 167895 - protein, 8 aa, Homo Sapiens
YFLEHLAF

SEQ ID NO: 167896 - protein, 8 aa, Homo Sapiens
YFLQRHEL

SEQ ID NO: 167897 - protein, 8 aa, Homo Sapiens
YFNPHLVF

SEQ ID NO: 167898 - protein, 8 aa, Homo Sapiens
YFSSRPAL

SEQ ID NO: 167899 - protein, 8 aa, Homo Sapiens
YFVTREVM

SEQ ID NO: 167900 - protein, 8 aa, Homo Sapiens
YGAEALER

SEQ ID NO: 167901 - protein, 8 aa, Homo Sapiens
YGLEHLAY

SEQ ID NO: 167902 - protein, 8 aa, Homo Sapiens
YGMPRQIL

SEQ ID NO: 167903 - protein, 8 aa, Homo Sapiens
YIATPRVW

SEQ ID NO: 167904 - protein, 8 aa, Homo Sapiens
YMQFIRLL

SEQ ID NO: 167905 - protein, 8 aa, Homo Sapiens
YNAVGFTY

SEQ ID NO: 167906 - protein, 8 aa, Homo Sapiens
YNFVRDVL

SEQ ID NO: 167907 - protein, 8 aa, Homo Sapiens
YSATRAAL

SEQ ID NO: 167908 - protein, 8 aa, Homo Sapiens
YSNIRFQF

SEQ ID NO: 167909 - protein, 8 aa, Homo Sapiens
YSSIRGFL

SEQ ID NO: 167910 - protein, 8 aa, Homo Sapiens
YSTIRPYL

SEQ ID NO: 167911 - protein, 8 aa, Homo Sapiens
YSYVTEEL

SEQ ID NO: 167912 - protein, 8 aa, Homo Sapiens
YTGKRIAL

SEQ ID NO: 167913 - protein, 8 aa, Homo Sapiens
YTLLGHEF

SEQ ID NO: 167914 - protein, 8 aa, Homo Sapiens
YVTILPEL

SEQ ID NO: 167915 - protein, 8 aa, Homo Sapiens
YWQNHPEL

SEQ ID NO: 167916 - protein, 9 aa, Homo Sapiens
AAAAAALLY

SEQ ID NO: 167917 - protein, 9 aa, Homo Sapiens
AAAAGRIAI

SEQ ID NO: 167918 - protein, 9 aa, Homo Sapiens
AAAALHPAL

SEQ ID NO: 167919 - protein, 9 aa, Homo Sapiens
AAAARIEAM

SEQ ID NO: 167920 - protein, 9 aa, Homo Sapiens
AAAAVARLW

SEQ ID NO: 167921 - protein, 9 aa, Homo Sapiens
AAADIFKHY

SEQ ID NO: 167922 - protein, 9 aa, Homo Sapiens
AAADLERFF

SEQ ID NO: 167923 - protein, 9 aa, Homo Sapiens
AAADPKVAF

SEQ ID NO: 167924 - protein, 9 aa, Homo Sapiens
AAADSIKIW

SEQ ID NO: 167925 - protein, 9 aa, Homo Sapiens
AAAEVRISF

SEQ ID NO: 167926 - protein, 9 aa, Homo Sapiens
AAAFARRVL

SEQ ID NO: 167927 - protein, 9 aa, Homo Sapiens
AAAFEKQVL

SEQ ID NO: 167928 - protein, 9 aa, Homo Sapiens
AAAFGRIAF

SEQ ID NO: 167929 - protein, 9 aa, Homo Sapiens
AAAFHPEEY

SEQ ID NO: 167930 - protein, 9 aa, Homo Sapiens
AAAFQPLII

SEQ ID NO: 167931 - protein, 9 aa, Homo Sapiens
AAAHFYFEL

SEQ ID NO: 167932 - protein, 9 aa, Homo Sapiens
AAAIKALEL

SEQ ID NO: 167933 - protein, 9 aa, Homo Sapiens
AAAKAALIY

SEQ ID NO: 167934 - protein, 9 aa, Homo Sapiens
AAAKNIRVW

SEQ ID NO: 167935 - protein, 9 aa, Homo Sapiens
AAALPPPAY

SEQ ID NO: 167936 - protein, 9 aa, Homo Sapiens
AAALRDLSF

SEQ ID NO: 167937 - protein, 9 aa, Homo Sapiens
AAALRIQNM

SEQ ID NO: 167938 - protein, 9 aa, Homo Sapiens
AAALWRTFF

SEQ ID NO: 167939 - protein, 9 aa, Homo Sapiens
AAAMNWRLF

SEQ ID NO: 167940 - protein, 9 aa, Homo Sapiens
AAAMTLRTV

SEQ ID NO: 167941 - protein, 9 aa, Homo Sapiens
AAANAIRVY

SEQ ID NO: 167942 - protein, 9 aa, Homo Sapiens
AAANPTLAF

SEQ ID NO: 167943 - protein, 9 aa, Homo Sapiens
AAAPALPFY

SEQ ID NO: 167944 - protein, 9 aa, Homo Sapiens
AAAPERVVL

SEQ ID NO: 167945 - protein, 9 aa, Homo Sapiens
AAAPHLLLL

SEQ ID NO: 167946 - protein, 9 aa, Homo Sapiens
AAAPLLPMI

SEQ ID NO: 167947 - protein, 9 aa, Homo Sapiens
AAAPLRPGM

SEQ ID NO: 167948 - protein, 9 aa, Homo Sapiens
AAAPQLLIV

SEQ ID NO: 167949 - protein, 9 aa, Homo Sapiens
AAAPSLLIL

SEQ ID NO: 167950 - protein, 9 aa, Homo Sapiens
AAAPVIKAY

SEQ ID NO: 167951 - protein, 9 aa, Homo Sapiens
AAARPKSAF

SEQ ID NO: 167952 - protein, 9 aa, Homo Sapiens
AAARRFYQY

SEQ ID NO: 167953 - protein, 9 aa, Homo Sapiens
AAASAKLAF

SEQ ID NO: 167954 - protein, 9 aa, Homo Sapiens
AAASHFFNL

SEQ ID NO: 167955 - protein, 9 aa, Homo Sapiens
AAASLIRLV

SEQ ID NO: 167956 - protein, 9 aa, Homo Sapiens
AAATRTTSF

SEQ ID NO: 167957 - protein, 9 aa, Homo Sapiens
AAAVDIRTW

SEQ ID NO: 167958 - protein, 9 aa, Homo Sapiens
AAAVPRAAF

SEQ ID NO: 167959 - protein, 9 aa, Homo Sapiens
AAAVPTRSY

SEQ ID NO: 167960 - protein, 9 aa, Homo Sapiens
AADWHNLIL

SEQ ID NO: 167961 - protein, 9 aa, Homo Sapiens
AAFAHNYDL

SEQ ID NO: 167962 - protein, 9 aa, Homo Sapiens
AAFAYTVKY

SEQ ID NO: 167963 - protein, 9 aa, Homo Sapiens
AAFDGGFTV

SEQ ID NO: 167964 - protein, 9 aa, Homo Sapiens
AAFDQWREW

SEQ ID NO: 167965 - protein, 9 aa, Homo Sapiens
AAFLILPEL

SEQ ID NO: 167966 - protein, 9 aa, Homo Sapiens
AAFLKAIGY

SEQ ID NO: 167967 - protein, 9 aa, Homo Sapiens
AAFLRHWKL

SEQ ID NO: 167968 - protein, 9 aa, Homo Sapiens
AAFTRALEY

SEQ ID NO: 167969 - protein, 9 aa, Homo Sapiens
AAFVKAVGF

SEQ ID NO: 167970 - protein, 9 aa, Homo Sapiens
AAFVKKLVY

SEQ ID NO: 167971 - protein, 9 aa, Homo Sapiens
AAGIKLIFF

SEQ ID NO: 167972 - protein, 9 aa, Homo Sapiens
AAGLRVLAV

SEQ ID NO: 167973 - protein, 9 aa, Homo Sapiens
AAGTRMYEY

SEQ ID NO: 167974 - protein, 9 aa, Homo Sapiens
AAIEWIIEH

SEQ ID NO: 167975 - protein, 9 aa, Homo Sapiens
AAIFHYLII

SEQ ID NO: 167976 - protein, 9 aa, Homo Sapiens
AAIGLVIYY

SEQ ID NO: 167977 - protein, 9 aa, Homo Sapiens
AAIKAFIAV

SEQ ID NO: 167978 - protein, 9 aa, Homo Sapiens
AAIKAIKFY

SEQ ID NO: 167979 - protein, 9 aa, Homo Sapiens
AAIKAIKLY

SEQ ID NO: 167980 - protein, 9 aa, Homo Sapiens
AAIKIIRQL

SEQ ID NO: 167981 - protein, 9 aa, Homo Sapiens
AAISHGRVF

SEQ ID NO: 167982 - protein, 9 aa, Homo Sapiens
AAKAALAAF

SEQ ID NO: 167983 - protein, 9 aa, Homo Sapiens
AAKEYPFIL

SEQ ID NO: 167984 - protein, 9 aa, Homo Sapiens
AAKFYSFLV

SEQ ID NO: 167985 - protein, 9 aa, Homo Sapiens
AAKIGNLEM

SEQ ID NO: 167986 - protein, 9 aa, Homo Sapiens
AAKPFFCEL

SEQ ID NO: 167987 - protein, 9 aa, Homo Sapiens
AAKQVLLYL

SEQ ID NO: 167988 - protein, 9 aa, Homo Sapiens
AAKSYIQSL

SEQ ID NO: 167989 - protein, 9 aa, Homo Sapiens
AAKTLILCL

SEQ ID NO: 167990 - protein, 9 aa, Homo Sapiens
AALARLLAA

SEQ ID NO: 167991 - protein, 9 aa, Homo Sapiens
AALFKAWAL

SEQ ID NO: 167992 - protein, 9 aa, Homo Sapiens
AALGFAQML

SEQ ID NO: 167993 - protein, 9 aa, Homo Sapiens
AALLRTFSF

SEQ ID NO: 167994 - protein, 9 aa, Homo Sapiens
AALNQALEM

SEQ ID NO: 167995 - protein, 9 aa, Homo Sapiens
AALPNVYEV

SEQ ID NO: 167996 - protein, 9 aa, Homo Sapiens
AALPVYQEL

SEQ ID NO: 167997 - protein, 9 aa, Homo Sapiens
AALWRFAEL

SEQ ID NO: 167998 - protein, 9 aa, Homo Sapiens
AALYHGMAL

SEQ ID NO: 167999 - protein, 9 aa, Homo Sapiens
AAMDEIPVL

SEQ ID NO: 168000 - protein, 9 aa, Homo Sapiens
AAMDYHWVF

SEQ ID NO: 168001 - protein, 9 aa, Homo Sapiens
AAMEFLQEL

SEQ ID NO: 168002 - protein, 9 aa, Homo Sapiens
AAMELAQMV

SEQ ID NO: 168003 - protein, 9 aa, Homo Sapiens
AAMMAVRVL

SEQ ID NO: 168004 - protein, 9 aa, Homo Sapiens
AAMPRIYEL

SEQ ID NO: 168005 - protein, 9 aa, Homo Sapiens
AAMPRPVSY

SEQ ID NO: 168006 - protein, 9 aa, Homo Sapiens
AAMSHLLEM

SEQ ID NO: 168007 - protein, 9 aa, Homo Sapiens
AAMYKSLEL

SEQ ID NO: 168008 - protein, 9 aa, Homo Sapiens
AANIYPLSL

SEQ ID NO: 168009 - protein, 9 aa, Homo Sapiens
AANLFAQTY

SEQ ID NO: 168010 - protein, 9 aa, Homo Sapiens
AANLKSIDF

SEQ ID NO: 168011 - protein, 9 aa, Homo Sapiens
AANLLIPAV

SEQ ID NO: 168012 - protein, 9 aa, Homo Sapiens
AANLRMHIF

SEQ ID NO: 168013 - protein, 9 aa, Homo Sapiens
AANPFFKLL

SEQ ID NO: 168014 - protein, 9 aa, Homo Sapiens
AANPHSFVF

SEQ ID NO: 168015 - protein, 9 aa, Homo Sapiens
AAQDRVLSL

SEQ ID NO: 168016 - protein, 9 aa, Homo Sapiens
AAQEAVKLY

SEQ ID NO: 168017 - protein, 9 aa, Homo Sapiens
AAQEGHLEL

SEQ ID NO: 168018 - protein, 9 aa, Homo Sapiens
AAQFIPKFF

SEQ ID NO: 168019 - protein, 9 aa, Homo Sapiens
AAQLRAQAL

SEQ ID NO: 168020 - protein, 9 aa, Homo Sapiens
AAQLRELQL

SEQ ID NO: 168021 - protein, 9 aa, Homo Sapiens
AAQLRPISL

SEQ ID NO: 168022 - protein, 9 aa, Homo Sapiens
AARDAILRI

SEQ ID NO: 168023 - protein, 9 aa, Homo Sapiens
AARDFVNYL

SEQ ID NO: 168024 - protein, 9 aa, Homo Sapiens
AARDVFLML

SEQ ID NO: 168025 - protein, 9 aa, Homo Sapiens
AAREFILKM

SEQ ID NO: 168026 - protein, 9 aa, Homo Sapiens
AAREFSHML

SEQ ID NO: 168027 - protein, 9 aa, Homo Sapiens
AAREVILVL

SEQ ID NO: 168028 - protein, 9 aa, Homo Sapiens
AARLRAVDF

SEQ ID NO: 168029 - protein, 9 aa, Homo Sapiens
AARPFTQTL

SEQ ID NO: 168030 - protein, 9 aa, Homo Sapiens
AARPVLLQV

SEQ ID NO: 168031 - protein, 9 aa, Homo Sapiens
AARSFYYKL

SEQ ID NO: 168032 - protein, 9 aa, Homo Sapiens
AARSGPLAM

SEQ ID NO: 168033 - protein, 9 aa, Homo Sapiens
AARSSIRVV

SEQ ID NO: 168034 - protein, 9 aa, Homo Sapiens
AARSVFLHL

SEQ ID NO: 168035 - protein, 9 aa, Homo Sapiens
AARTQQLLL

SEQ ID NO: 168036 - protein, 9 aa, Homo Sapiens
AARVFYLLL

SEQ ID NO: 168037 - protein, 9 aa, Homo Sapiens
AASAIYRLF

SEQ ID NO: 168038 - protein, 9 aa, Homo Sapiens
AASALIRTL

SEQ ID NO: 168039 - protein, 9 aa, Homo Sapiens
AASALNRLL

SEQ ID NO: 168040 - protein, 9 aa, Homo Sapiens
AASEVLKHL

SEQ ID NO: 168041 - protein, 9 aa, Homo Sapiens
AASFHSLSL

SEQ ID NO: 168042 - protein, 9 aa, Homo Sapiens
AASFINLLY

SEQ ID NO: 168043 - protein, 9 aa, Homo Sapiens
AASFVGYSY

SEQ ID NO: 168044 - protein, 9 aa, Homo Sapiens
AASFYQRAL

SEQ ID NO: 168045 - protein, 9 aa, Homo Sapiens
AASGHFICV

SEQ ID NO: 168046 - protein, 9 aa, Homo Sapiens
AASGLPLMV

SEQ ID NO: 168047 - protein, 9 aa, Homo Sapiens
AASLQVLEM

SEQ ID NO: 168048 - protein, 9 aa, Homo Sapiens
AASLRKVSM

SEQ ID NO: 168049 - protein, 9 aa, Homo Sapiens
AASLSYRVL

SEQ ID NO: 168050 - protein, 9 aa, Homo Sapiens
AASMRALVL

SEQ ID NO: 168051 - protein, 9 aa, Homo Sapiens
AASNYFRAM

SEQ ID NO: 168052 - protein, 9 aa, Homo Sapiens
AASPFYRGY

SEQ ID NO: 168053 - protein, 9 aa, Homo Sapiens
AASPKSFTL

SEQ ID NO: 168054 - protein, 9 aa, Homo Sapiens
AASPPRPLL

SEQ ID NO: 168055 - protein, 9 aa, Homo Sapiens
AASPYFRAM

SEQ ID NO: 168056 - protein, 9 aa, Homo Sapiens
AASQINRAY

SEQ ID NO: 168057 - protein, 9 aa, Homo Sapiens
AASSIQRVL

SEQ ID NO: 168058 - protein, 9 aa, Homo Sapiens
AASTAIYVY

SEQ ID NO: 168059 - protein, 9 aa, Homo Sapiens
AASTARHLY

SEQ ID NO: 168060 - protein, 9 aa, Homo Sapiens
AASTLVHKF

SEQ ID NO: 168061 - protein, 9 aa, Homo Sapiens
AASVSLHLL

SEQ ID NO: 168062 - protein, 9 aa, Homo Sapiens
AASWTSRQV

SEQ ID NO: 168063 - protein, 9 aa, Homo Sapiens
AASYVRKVI

SEQ ID NO: 168064 - protein, 9 aa, Homo Sapiens
AATAVTNLY

SEQ ID NO: 168065 - protein, 9 aa, Homo Sapiens
AATAVWHAY

SEQ ID NO: 168066 - protein, 9 aa, Homo Sapiens
AATDIARQV

SEQ ID NO: 168067 - protein, 9 aa, Homo Sapiens
AATDVRRVW

SEQ ID NO: 168068 - protein, 9 aa, Homo Sapiens
AATEKLLEY

SEQ ID NO: 168069 - protein, 9 aa, Homo Sapiens
AATFQRASY

SEQ ID NO: 168070 - protein, 9 aa, Homo Sapiens
AATFRGIGM

SEQ ID NO: 168071 - protein, 9 aa, Homo Sapiens
AATGFLKLL

SEQ ID NO: 168072 - protein, 9 aa, Homo Sapiens
AATLAGRLY

SEQ ID NO: 168073 - protein, 9 aa, Homo Sapiens
AATLATHEL

SEQ ID NO: 168074 - protein, 9 aa, Homo Sapiens
AATLFPRKM

SEQ ID NO: 168075 - protein, 9 aa, Homo Sapiens
AATLLHLEL

SEQ ID NO: 168076 - protein, 9 aa, Homo Sapiens
AATLTSKLY

SEQ ID NO: 168077 - protein, 9 aa, Homo Sapiens
AATPAVRTV

SEQ ID NO: 168078 - protein, 9 aa, Homo Sapiens
AATRWAKKI

SEQ ID NO: 168079 - protein, 9 aa, Homo Sapiens
AATSRIAEL

SEQ ID NO: 168080 - protein, 9 aa, Homo Sapiens
AATSRTYLY

SEQ ID NO: 168081 - protein, 9 aa, Homo Sapiens
AATTVLQEL

SEQ ID NO: 168082 - protein, 9 aa, Homo Sapiens
AATTVLRQL

SEQ ID NO: 168083 - protein, 9 aa, Homo Sapiens
AATVRPVTL

SEQ ID NO: 168084 - protein, 9 aa, Homo Sapiens
AAVAAHRFF

SEQ ID NO: 168085 - protein, 9 aa, Homo Sapiens
AAVAELPVL

SEQ ID NO: 168086 - protein, 9 aa, Homo Sapiens
AAVDLKPTL

SEQ ID NO: 168087 - protein, 9 aa, Homo Sapiens
AAVLRHISV

SEQ ID NO: 168088 - protein, 9 aa, Homo Sapiens
AAVLRNIKF

SEQ ID NO: 168089 - protein, 9 aa, Homo Sapiens
AAVLVLREL

SEQ ID NO: 168090 - protein, 9 aa, Homo Sapiens
AAVNRIHSF

SEQ ID NO: 168091 - protein, 9 aa, Homo Sapiens
AAVPLVRLF

SEQ ID NO: 168092 - protein, 9 aa, Homo Sapiens
AAVPLYRLY

SEQ ID NO: 168093 - protein, 9 aa, Homo Sapiens
AAVWKGHVM

SEQ ID NO: 168094 - protein, 9 aa, Homo Sapiens
AAVWPYRRL

SEQ ID NO: 168095 - protein, 9 aa, Homo Sapiens
AAWLQVLPV

SEQ ID NO: 168096 - protein, 9 aa, Homo Sapiens
AAYAGGLVL

SEQ ID NO: 168097 - protein, 9 aa, Homo Sapiens
AAYLRALSL

SEQ ID NO: 168098 - protein, 9 aa, Homo Sapiens
AAYLRIHAV

SEQ ID NO: 168099 - protein, 9 aa, Homo Sapiens
AAYPQVRCY

SEQ ID NO: 168100 - protein, 9 aa, Homo Sapiens
AFAEFLRTY

SEQ ID NO: 168101 - protein, 9 aa, Homo Sapiens
AFFSRVETF

SEQ ID NO: 168102 - protein, 9 aa, Homo Sapiens
AFFVREALF

SEQ ID NO: 168103 - protein, 9 aa, Homo Sapiens
AFQERLNSY

SEQ ID NO: 168104 - protein, 9 aa, Homo Sapiens
AFVYLRQPY

SEQ ID NO: 168105 - protein, 9 aa, Homo Sapiens
AFYDPTHAW

SEQ ID NO: 168106 - protein, 9 aa, Homo Sapiens
AGKEVFLVM

SEQ ID NO: 168107 - protein, 9 aa, Homo Sapiens
AGSALPRLY

SEQ ID NO: 168108 - protein, 9 aa, Homo Sapiens
AGSPFHPAM

SEQ ID NO: 168109 - protein, 9 aa, Homo Sapiens
AGYYRKYFY

SEQ ID NO: 168110 - protein, 9 aa, Homo Sapiens
AIADAKLSF

SEQ ID NO: 168111 - protein, 9 aa, Homo Sapiens
AISENYRIM

SEQ ID NO: 168112 - protein, 9 aa, Homo Sapiens
AISGFAYEY

SEQ ID NO: 168113 - protein, 9 aa, Homo Sapiens
ALALRFLAL

SEQ ID NO: 168114 - protein, 9 aa, Homo Sapiens
ALFFRFVDF

SEQ ID NO: 168115 - protein, 9 aa, Homo Sapiens
ALGVRDLSY

SEQ ID NO: 168116 - protein, 9 aa, Homo Sapiens
ALLLIRLPY

SEQ ID NO: 168117 - protein, 9 aa, Homo Sapiens
ALRPPLPPL

SEQ ID NO: 168118 - protein, 9 aa, Homo Sapiens
ALSFVQRTF

SEQ ID NO: 168119 - protein, 9 aa, Homo Sapiens
ALSPNHRIY

SEQ ID NO: 168120 - protein, 9 aa, Homo Sapiens
ALSVRPNDY

SEQ ID NO: 168121 - protein, 9 aa, Homo Sapiens
ALTEWLRFY

SEQ ID NO: 168122 - protein, 9 aa, Homo Sapiens
AMALRNKSF

SEQ ID NO: 168123 - protein, 9 aa, Homo Sapiens
AMAVRIQAY

SEQ ID NO: 168124 - protein, 9 aa, Homo Sapiens
AMMANRLSF

SEQ ID NO: 168125 - protein, 9 aa, Homo Sapiens
AMYSRKAMY

SEQ ID NO: 168126 - protein, 9 aa, Homo Sapiens
ANMFRFYAL

SEQ ID NO: 168127 - protein, 9 aa, Homo Sapiens
ANVVRNISY

SEQ ID NO: 168128 - protein, 9 aa, Homo Sapiens
AQHPLRPEF

SEQ ID NO: 168129 - protein, 9 aa, Homo Sapiens
AQSDIEHLF

SEQ ID NO: 168130 - protein, 9 aa, Homo Sapiens
AQTLRHYGY

SEQ ID NO: 168131 - protein, 9 aa, Homo Sapiens
ASAVTVRFY

SEQ ID NO: 168132 - protein, 9 aa, Homo Sapiens
ASFHRVQAL

SEQ ID NO: 168133 - protein, 9 aa, Homo Sapiens
ASFHRVWSF

SEQ ID NO: 168134 - protein, 9 aa, Homo Sapiens
ASLLRVEPF

SEQ ID NO: 168135 - protein, 9 aa, Homo Sapiens
ASNIMIVTL

SEQ ID NO: 168136 - protein, 9 aa, Homo Sapiens
ASSLAIREW

SEQ ID NO: 168137 - protein, 9 aa, Homo Sapiens
ASSLRLYLY

SEQ ID NO: 168138 - protein, 9 aa, Homo Sapiens
ASSPGHPAF

SEQ ID NO: 168139 - protein, 9 aa, Homo Sapiens
ASSPHGLVM

SEQ ID NO: 168140 - protein, 9 aa, Homo Sapiens
ASSPVLRQM

SEQ ID NO: 168141 - protein, 9 aa, Homo Sapiens
ASSSAFRLM

SEQ ID NO: 168142 - protein, 9 aa, Homo Sapiens
ASTLRVVVF

SEQ ID NO: 168143 - protein, 9 aa, Homo Sapiens
ASTPVAREL

SEQ ID NO: 168144 - protein, 9 aa, Homo Sapiens
ASTVRILEV

SEQ ID NO: 168145 - protein, 9 aa, Homo Sapiens
ASTVVTYVY

SEQ ID NO: 168146 - protein, 9 aa, Homo Sapiens
ASVLRSISL

SEQ ID NO: 168147 - protein, 9 aa, Homo Sapiens
ASYERLDVF

SEQ ID NO: 168148 - protein, 9 aa, Homo Sapiens
ASYLRLWAL

SEQ ID NO: 168149 - protein, 9 aa, Homo Sapiens
ATFVKEITY

SEQ ID NO: 168150 - protein, 9 aa, Homo Sapiens
ATMFPRREF

SEQ ID NO: 168151 - protein, 9 aa, Homo Sapiens
ATTDWIAIY

SEQ ID NO: 168152 - protein, 9 aa, Homo Sapiens
ATTLLHKVF

SEQ ID NO: 168153 - protein, 9 aa, Homo Sapiens
ATTLRLSAY

SEQ ID NO: 168154 - protein, 9 aa, Homo Sapiens
AVAERLWEY

SEQ ID NO: 168155 - protein, 9 aa, Homo Sapiens
AVLLRFWAF

SEQ ID NO: 168156 - protein, 9 aa, Homo Sapiens
AVSAVVHEY

SEQ ID NO: 168157 - protein, 9 aa, Homo Sapiens
AVSNVFKIL

SEQ ID NO: 168158 - protein, 9 aa, Homo Sapiens
AVSPIAKYY

SEQ ID NO: 168159 - protein, 9 aa, Homo Sapiens
AVSSWFRQL

SEQ ID NO: 168160 - protein, 9 aa, Homo Sapiens
AVSYRQVAF

SEQ ID NO: 168161 - protein, 9 aa, Homo Sapiens
AVTASIHVY

SEQ ID NO: 168162 - protein, 9 aa, Homo Sapiens
AVTHIGRVY

SEQ ID NO: 168163 - protein, 9 aa, Homo Sapiens
AWMDNIREW

SEQ ID NO: 168164 - protein, 9 aa, Homo Sapiens
CAADFPWEL

SEQ ID NO: 168165 - protein, 9 aa, Homo Sapiens
CAFDRGLEM

SEQ ID NO: 168166 - protein, 9 aa, Homo Sapiens
CAHSFFDEL

SEQ ID NO: 168167 - protein, 9 aa, Homo Sapiens
CAIAQAESL

SEQ ID NO: 168168 - protein, 9 aa, Homo Sapiens
CAIPDLGPA

SEQ ID NO: 168169 - protein, 9 aa, Homo Sapiens
CAKQDWLIL

SEQ ID NO: 168170 - protein, 9 aa, Homo Sapiens
CALDFFRQI

SEQ ID NO: 168171 - protein, 9 aa, Homo Sapiens
CAQDAFFQV

SEQ ID NO: 168172 - protein, 9 aa, Homo Sapiens
CASDKILEF

SEQ ID NO: 168173 - protein, 9 aa, Homo Sapiens
CASLFLRLL

SEQ ID NO: 168174 - protein, 9 aa, Homo Sapiens
CATKLFKKY

SEQ ID NO: 168175 - protein, 9 aa, Homo Sapiens
CATPEWRHF

SEQ ID NO: 168176 - protein, 9 aa, Homo Sapiens
CGALKNISF

SEQ ID NO: 168177 - protein, 9 aa, Homo Sapiens
CGTISLRVY

SEQ ID NO: 168178 - protein, 9 aa, Homo Sapiens
CLADIFRIY

SEQ ID NO: 168179 - protein, 9 aa, Homo Sapiens
CSNIRDSSF

SEQ ID NO: 168180 - protein, 9 aa, Homo Sapiens
CSSDFIRIL

SEQ ID NO: 168181 - protein, 9 aa, Homo Sapiens
CSSPHALVL

SEQ ID NO: 168182 - protein, 9 aa, Homo Sapiens
CTAIREVSL

SEQ ID NO: 168183 - protein, 9 aa, Homo Sapiens
CTTPHLHSI

SEQ ID NO: 168184 - protein, 9 aa, Homo Sapiens
DAFERIDSF

SEQ ID NO: 168185 - protein, 9 aa, Homo Sapiens
DAKIRIFDL

SEQ ID NO: 168186 - protein, 9 aa, Homo Sapiens
DFSIRTYTY

SEQ ID NO: 168187 - protein, 9 aa, Homo Sapiens
DWFERPDSF

SEQ ID NO: 168188 - protein, 9 aa, Homo Sapiens
DYSVVLLLR

SEQ ID NO: 168189 - protein, 9 aa, Homo Sapiens
EASWRFTFY

SEQ ID NO: 168190 - protein, 9 aa, Homo Sapiens
EATDYLRNL

SEQ ID NO: 168191 - protein, 9 aa, Homo Sapiens
EATSFIKQI

SEQ ID NO: 168192 - protein, 9 aa, Homo Sapiens
ELALRLTEY

SEQ ID NO: 168193 - protein, 9 aa, Homo Sapiens
ELYQRIYAF

SEQ ID NO: 168194 - protein, 9 aa, Homo Sapiens
EMMELREAF

SEQ ID NO: 168195 - protein, 9 aa, Homo Sapiens
ESQLRSYSF

SEQ ID NO: 168196 - protein, 9 aa, Homo Sapiens
ESTVRTIAM

SEQ ID NO: 168197 - protein, 9 aa, Homo Sapiens
ESYLRRVVY

SEQ ID NO: 168198 - protein, 9 aa, Homo Sapiens
ETFQRPYQY

SEQ ID NO: 168199 - protein, 9 aa, Homo Sapiens
FAAAKLLAL

SEQ ID NO: 168200 - protein, 9 aa, Homo Sapiens
FAAASREVL

SEQ ID NO: 168201 - protein, 9 aa, Homo Sapiens
FAADIISVL

SEQ ID NO: 168202 - protein, 9 aa, Homo Sapiens
FAADIPRIL

SEQ ID NO: 168203 - protein, 9 aa, Homo Sapiens
FAADVRLMF

SEQ ID NO: 168204 - protein, 9 aa, Homo Sapiens
FAAFFSHIL

SEQ ID NO: 168205 - protein, 9 aa, Homo Sapiens
FAAFFTRAF

SEQ ID NO: 168206 - protein, 9 aa, Homo Sapiens
FAAHLRCTY

SEQ ID NO: 168207 - protein, 9 aa, Homo Sapiens
FAALEKTYY

SEQ ID NO: 168208 - protein, 9 aa, Homo Sapiens
FAALHGPAL

SEQ ID NO: 168209 - protein, 9 aa, Homo Sapiens
FAALIARTA

SEQ ID NO: 168210 - protein, 9 aa, Homo Sapiens
FAALQLEYF

SEQ ID NO: 168211 - protein, 9 aa, Homo Sapiens
FAAQRGLAV

SEQ ID NO: 168212 - protein, 9 aa, Homo Sapiens
FAASFAHLL

SEQ ID NO: 168213 - protein, 9 aa, Homo Sapiens
FAASGGFLH

SEQ ID NO: 168214 - protein, 9 aa, Homo Sapiens
FAASVAHLY

SEQ ID NO: 168215 - protein, 9 aa, Homo Sapiens
FAATHSLEF

SEQ ID NO: 168216 - protein, 9 aa, Homo Sapiens
FAAVAAAAY

SEQ ID NO: 168217 - protein, 9 aa, Homo Sapiens
FAAYWKPVL

SEQ ID NO: 168218 - protein, 9 aa, Homo Sapiens
FADGFVLVY

SEQ ID NO: 168219 - protein, 9 aa, Homo Sapiens
FADGHVLEL

SEQ ID NO: 168220 - protein, 9 aa, Homo Sapiens
FADPFAFIH

SEQ ID NO: 168221 - protein, 9 aa, Homo Sapiens
FADPHGKVF

SEQ ID NO: 168222 - protein, 9 aa, Homo Sapiens
FAEDSLRVI

SEQ ID NO: 168223 - protein, 9 aa, Homo Sapiens
FAEPGRVPF

SEQ ID NO: 168224 - protein, 9 aa, Homo Sapiens
FAFCYPFSY

SEQ ID NO: 168225 - protein, 9 aa, Homo Sapiens
FAFDPSVNY

SEQ ID NO: 168226 - protein, 9 aa, Homo Sapiens
FAFDSPHHY

SEQ ID NO: 168227 - protein, 9 aa, Homo Sapiens
FAFEHSEEY

SEQ ID NO: 168228 - protein, 9 aa, Homo Sapiens
FAFFDPVMY

SEQ ID NO: 168229 - protein, 9 aa, Homo Sapiens
FAFLRFVVY

SEQ ID NO: 168230 - protein, 9 aa, Homo Sapiens
FAFTPSRIY

SEQ ID NO: 168231 - protein, 9 aa, Homo Sapiens
FAFVTDNTY

SEQ ID NO: 168232 - protein, 9 aa, Homo Sapiens
FAGFLPRII

SEQ ID NO: 168233 - protein, 9 aa, Homo Sapiens
FAGFQRKAV

SEQ ID NO: 168234 - protein, 9 aa, Homo Sapiens
FAGLVPRLL

SEQ ID NO: 168235 - protein, 9 aa, Homo Sapiens
FAGNFERTV

SEQ ID NO: 168236 - protein, 9 aa, Homo Sapiens
FAHDSTRVI

SEQ ID NO: 168237 - protein, 9 aa, Homo Sapiens
FAHLRLEVL

SEQ ID NO: 168238 - protein, 9 aa, Homo Sapiens
FAHPPLLVL

SEQ ID NO: 168239 - protein, 9 aa, Homo Sapiens
FAHPYQYEL

SEQ ID NO: 168240 - protein, 9 aa, Homo Sapiens
FAIDPHLLL

SEQ ID NO: 168241 - protein, 9 aa, Homo Sapiens
FAIEREFFF

SEQ ID NO: 168242 - protein, 9 aa, Homo Sapiens
FAIFKVTAY

SEQ ID NO: 168243 - protein, 9 aa, Homo Sapiens
FAIKSLRKL

SEQ ID NO: 168244 - protein, 9 aa, Homo Sapiens
FAILRQAEL

SEQ ID NO: 168245 - protein, 9 aa, Homo Sapiens
FAIPLIEKL

SEQ ID NO: 168246 - protein, 9 aa, Homo Sapiens
FAIPMIHAV

SEQ ID NO: 168247 - protein, 9 aa, Homo Sapiens
FAIQKGLQA

SEQ ID NO: 168248 - protein, 9 aa, Homo Sapiens
FAISILQQI

SEQ ID NO: 168249 - protein, 9 aa, Homo Sapiens
FAKATFDAI

SEQ ID NO: 168250 - protein, 9 aa, Homo Sapiens
FAKDFMTYL

SEQ ID NO: 168251 - protein, 9 aa, Homo Sapiens
FAKEHQEFL

SEQ ID NO: 168252 - protein, 9 aa, Homo Sapiens
FAKFHPNLV

SEQ ID NO: 168253 - protein, 9 aa, Homo Sapiens
FAKMVVDAV

SEQ ID NO: 168254 - protein, 9 aa, Homo Sapiens
FAKPENIDL

SEQ ID NO: 168255 - protein, 9 aa, Homo Sapiens
FAKPFLASL

SEQ ID NO: 168256 - protein, 9 aa, Homo Sapiens
FAKVHILYV

SEQ ID NO: 168257 - protein, 9 aa, Homo Sapiens
FAKYWHIIL

SEQ ID NO: 168258 - protein, 9 aa, Homo Sapiens
FALAMKDTL

SEQ ID NO: 168259 - protein, 9 aa, Homo Sapiens
FALDMKYAL

SEQ ID NO: 168260 - protein, 9 aa, Homo Sapiens
FALDSGLEI

SEQ ID NO: 168261 - protein, 9 aa, Homo Sapiens
FALGSPIAM

SEQ ID NO: 168262 - protein, 9 aa, Homo Sapiens
FALGVYRTL

SEQ ID NO: 168263 - protein, 9 aa, Homo Sapiens
FALHKTLEF

SEQ ID NO: 168264 - protein, 9 aa, Homo Sapiens
FALLPRLEY

SEQ ID NO: 168265 - protein, 9 aa, Homo Sapiens
FALLTTPEM

SEQ ID NO: 168266 - protein, 9 aa, Homo Sapiens
FALPFGRTA

SEQ ID NO: 168267 - protein, 9 aa, Homo Sapiens
FALPSPQHI

SEQ ID NO: 168268 - protein, 9 aa, Homo Sapiens
FALPVGLIV

SEQ ID NO: 168269 - protein, 9 aa, Homo Sapiens
FALPYIRDV

SEQ ID NO: 168270 - protein, 9 aa, Homo Sapiens
FALPYVIVL

SEQ ID NO: 168271 - protein, 9 aa, Homo Sapiens
FALSQPRAM

SEQ ID NO: 168272 - protein, 9 aa, Homo Sapiens
FALTKVQQY

SEQ ID NO: 168273 - protein, 9 aa, Homo Sapiens
FALVRTIRY

SEQ ID NO: 168274 - protein, 9 aa, Homo Sapiens
FAMAGHENL

SEQ ID NO: 168275 - protein, 9 aa, Homo Sapiens
FAMDVYKNL

SEQ ID NO: 168276 - protein, 9 aa, Homo Sapiens
FAMEFVKYY

SEQ ID NO: 168277 - protein, 9 aa, Homo Sapiens
FAMEIDPSL

SEQ ID NO: 168278 - protein, 9 aa, Homo Sapiens
FAMPPPHGM

SEQ ID NO: 168279 - protein, 9 aa, Homo Sapiens
FAMPSSTPL

SEQ ID NO: 168280 - protein, 9 aa, Homo Sapiens
FAMPYFIQV

SEQ ID NO: 168281 - protein, 9 aa, Homo Sapiens
FAMQLVKIL

SEQ ID NO: 168282 - protein, 9 aa, Homo Sapiens
FAMSYVKLM

SEQ ID NO: 168283 - protein, 9 aa, Homo Sapiens
FAMVKGYFF

SEQ ID NO: 168284 - protein, 9 aa, Homo Sapiens
FAMYPPSMI

SEQ ID NO: 168285 - protein, 9 aa, Homo Sapiens
FANDATFEI

SEQ ID NO: 168286 - protein, 9 aa, Homo Sapiens
FANERCLQL

SEQ ID NO: 168287 - protein, 9 aa, Homo Sapiens
FANFANFSK

SEQ ID NO: 168288 - protein, 9 aa, Homo Sapiens
FANLKYVSL

SEQ ID NO: 168289 - protein, 9 aa, Homo Sapiens
FANLPNQVY

SEQ ID NO: 168290 - protein, 9 aa, Homo Sapiens
FANNVQLSL

SEQ ID NO: 168291 - protein, 9 aa, Homo Sapiens
FANSRDTSF

SEQ ID NO: 168292 - protein, 9 aa, Homo Sapiens
FANTRIENF

SEQ ID NO: 168293 - protein, 9 aa, Homo Sapiens
FANTRLQSV

SEQ ID NO: 168294 - protein, 9 aa, Homo Sapiens
FAPEKLQEL

SEQ ID NO: 168295 - protein, 9 aa, Homo Sapiens
FAPIQPLAM

SEQ ID NO: 168296 - protein, 9 aa, Homo Sapiens
FAQAPQLSV

SEQ ID NO: 168297 - protein, 9 aa, Homo Sapiens
FAQDVGRMF

SEQ ID NO: 168298 - protein, 9 aa, Homo Sapiens
FAQEAISVL

SEQ ID NO: 168299 - protein, 9 aa, Homo Sapiens
FAQEALTVL

SEQ ID NO: 168300 - protein, 9 aa, Homo Sapiens
FAQERRWKV

SEQ ID NO: 168301 - protein, 9 aa, Homo Sapiens
FAQIVLPAL

SEQ ID NO: 168302 - protein, 9 aa, Homo Sapiens
FAQKISRTV

SEQ ID NO: 168303 - protein, 9 aa, Homo Sapiens
FAQMYQKTL

SEQ ID NO: 168304 - protein, 9 aa, Homo Sapiens
FAQNKPTGF

SEQ ID NO: 168305 - protein, 9 aa, Homo Sapiens
FAQPGSFEY

SEQ ID NO: 168306 - protein, 9 aa, Homo Sapiens
FAQPGTFEF

SEQ ID NO: 168307 - protein, 9 aa, Homo Sapiens
FAQTLHPSL

SEQ ID NO: 168308 - protein, 9 aa, Homo Sapiens
FAQVFHLIL

SEQ ID NO: 168309 - protein, 9 aa, Homo Sapiens
FAQYLISEL

SEQ ID NO: 168310 - protein, 9 aa, Homo Sapiens
FAREALRAL

SEQ ID NO: 168311 - protein, 9 aa, Homo Sapiens
FARELANQL

SEQ ID NO: 168312 - protein, 9 aa, Homo Sapiens
FARFLNYQL

SEQ ID NO: 168313 - protein, 9 aa, Homo Sapiens
FARMCSLML

SEQ ID NO: 168314 - protein, 9 aa, Homo Sapiens
FARMKPRKI

SEQ ID NO: 168315 - protein, 9 aa, Homo Sapiens
FARPASPSL

SEQ ID NO: 168316 - protein, 9 aa, Homo Sapiens
FARQYYEML

SEQ ID NO: 168317 - protein, 9 aa, Homo Sapiens
FARSFHPML

SEQ ID NO: 168318 - protein, 9 aa, Homo Sapiens
FARSFTLML

SEQ ID NO: 168319 - protein, 9 aa, Homo Sapiens
FARSSYLVM

SEQ ID NO: 168320 - protein, 9 aa, Homo Sapiens
FARVGGRLF

SEQ ID NO: 168321 - protein, 9 aa, Homo Sapiens
FARWLFIGL

SEQ ID NO: 168322 - protein, 9 aa, Homo Sapiens
FASDVQFVL

SEQ ID NO: 168323 - protein, 9 aa, Homo Sapiens
FASEKKWAF

SEQ ID NO: 168324 - protein, 9 aa, Homo Sapiens
FASELSRSL

SEQ ID NO: 168325 - protein, 9 aa, Homo Sapiens
FASEVSNVL

SEQ ID NO: 168326 - protein, 9 aa, Homo Sapiens
FASEYPLIL

SEQ ID NO: 168327 - protein, 9 aa, Homo Sapiens
FASFIVQYY

SEQ ID NO: 168328 - protein, 9 aa, Homo Sapiens
FASFKPTYL

SEQ ID NO: 168329 - protein, 9 aa, Homo Sapiens
FASFPHMVL

SEQ ID NO: 168330 - protein, 9 aa, Homo Sapiens
FASFSDYYY

SEQ ID NO: 168331 - protein, 9 aa, Homo Sapiens
FASGANFEY

SEQ ID NO: 168332 - protein, 9 aa, Homo Sapiens
FASGLIHRV

SEQ ID NO: 168333 - protein, 9 aa, Homo Sapiens
FASHVSPEV

SEQ ID NO: 168334 - protein, 9 aa, Homo Sapiens
FASIAPSIY

SEQ ID NO: 168335 - protein, 9 aa, Homo Sapiens
FASIPGLEF

SEQ ID NO: 168336 - protein, 9 aa, Homo Sapiens
FASLPQVER

SEQ ID NO: 168337 - protein, 9 aa, Homo Sapiens
FASLVSQDY

SEQ ID NO: 168338 - protein, 9 aa, Homo Sapiens
FASSPLRVL

SEQ ID NO: 168339 - protein, 9 aa, Homo Sapiens
FASTILHLV

SEQ ID NO: 168340 - protein, 9 aa, Homo Sapiens
FASTMVHAL

SEQ ID NO: 168341 - protein, 9 aa, Homo Sapiens
FASTYLLLL

SEQ ID NO: 168342 - protein, 9 aa, Homo Sapiens
FASVFEKYF

SEQ ID NO: 168343 - protein, 9 aa, Homo Sapiens
FASVHSVSA

SEQ ID NO: 168344 - protein, 9 aa, Homo Sapiens
FASVLIRRI

SEQ ID NO: 168345 - protein, 9 aa, Homo Sapiens
FATDAILAT

SEQ ID NO: 168346 - protein, 9 aa, Homo Sapiens
FATDSGLEF

SEQ ID NO: 168347 - protein, 9 aa, Homo Sapiens
FATEGLRTL

SEQ ID NO: 168348 - protein, 9 aa, Homo Sapiens
FATESSHFY

SEQ ID NO: 168349 - protein, 9 aa, Homo Sapiens
FATEVFKAM

SEQ ID NO: 168350 - protein, 9 aa, Homo Sapiens
FATFLSHVL

SEQ ID NO: 168351 - protein, 9 aa, Homo Sapiens
FATGVWHQM

SEQ ID NO: 168352 - protein, 9 aa, Homo Sapiens
FATIKSASL

SEQ ID NO: 168353 - protein, 9 aa, Homo Sapiens
FATIKTVNY

SEQ ID NO: 168354 - protein, 9 aa, Homo Sapiens
FATIRFHDL

SEQ ID NO: 168355 - protein, 9 aa, Homo Sapiens
FATIRTASL

SEQ ID NO: 168356 - protein, 9 aa, Homo Sapiens
FATKVVHLL

SEQ ID NO: 168357 - protein, 9 aa, Homo Sapiens
FATLRWIDY

SEQ ID NO: 168358 - protein, 9 aa, Homo Sapiens
FATPFLVVR

SEQ ID NO: 168359 - protein, 9 aa, Homo Sapiens
FATPQYRGV

SEQ ID NO: 168360 - protein, 9 aa, Homo Sapiens
FATPVFITK

SEQ ID NO: 168361 - protein, 9 aa, Homo Sapiens
FATPYGYAM

SEQ ID NO: 168362 - protein, 9 aa, Homo Sapiens
FATRFDQVM

SEQ ID NO: 168363 - protein, 9 aa, Homo Sapiens
FATRRWIEY

SEQ ID NO: 168364 - protein, 9 aa, Homo Sapiens
FATSALRSL

SEQ ID NO: 168365 - protein, 9 aa, Homo Sapiens
FATSVLRWI

SEQ ID NO: 168366 - protein, 9 aa, Homo Sapiens
FATVRWIDY

SEQ ID NO: 168367 - protein, 9 aa, Homo Sapiens
FAVAMHLVY

SEQ ID NO: 168368 - protein, 9 aa, Homo Sapiens
FAVDFEKIY

SEQ ID NO: 168369 - protein, 9 aa, Homo Sapiens
FAVDSLRQL

SEQ ID NO: 168370 - protein, 9 aa, Homo Sapiens
FAVGSFHTL

SEQ ID NO: 168371 - protein, 9 aa, Homo Sapiens
FAVGSSRFW

SEQ ID NO: 168372 - protein, 9 aa, Homo Sapiens
FAVIAHVGM

SEQ ID NO: 168373 - protein, 9 aa, Homo Sapiens
FAVISRHSL

SEQ ID NO: 168374 - protein, 9 aa, Homo Sapiens
FAVNKKIEF

SEQ ID NO: 168375 - protein, 9 aa, Homo Sapiens
FAVNMFRTL

SEQ ID NO: 168376 - protein, 9 aa, Homo Sapiens
FAYEGPMYL

SEQ ID NO: 168377 - protein, 9 aa, Homo Sapiens
FAYHMIETY

SEQ ID NO: 168378 - protein, 9 aa, Homo Sapiens
FAYHYPYTY

SEQ ID NO: 168379 - protein, 9 aa, Homo Sapiens
FAYLGRLAH

SEQ ID NO: 168380 - protein, 9 aa, Homo Sapiens
FAYLRDLLI

SEQ ID NO: 168381 - protein, 9 aa, Homo Sapiens
FAYPAIRYL

SEQ ID NO: 168382 - protein, 9 aa, Homo Sapiens
FAYPAPLEV

SEQ ID NO: 168383 - protein, 9 aa, Homo Sapiens
FAYTARISV

SEQ ID NO: 168384 - protein, 9 aa, Homo Sapiens
FAYTSRHEI

SEQ ID NO: 168385 - protein, 9 aa, Homo Sapiens
FAYVEGESL

SEQ ID NO: 168386 - protein, 9 aa, Homo Sapiens
FAYYRDLVF

SEQ ID NO: 168387 - protein, 9 aa, Homo Sapiens
FAYYRVGEY

SEQ ID NO: 168388 - protein, 9 aa, Homo Sapiens
FCGLRGNEF

SEQ ID NO: 168389 - protein, 9 aa, Homo Sapiens
FCIQVGRTM

SEQ ID NO: 168390 - protein, 9 aa, Homo Sapiens
FCYVNDIVI

SEQ ID NO: 168391 - protein, 9 aa, Homo Sapiens
FFAERYESW

SEQ ID NO: 168392 - protein, 9 aa, Homo Sapiens
FFAPSRDMY

SEQ ID NO: 168393 - protein, 9 aa, Homo Sapiens
FFGIRDSSF

SEQ ID NO: 168394 - protein, 9 aa, Homo Sapiens
FFGTHETAF

SEQ ID NO: 168395 - protein, 9 aa, Homo Sapiens
FFIAGRYEF

SEQ ID NO: 168396 - protein, 9 aa, Homo Sapiens
FFKDRHWLF

SEQ ID NO: 168397 - protein, 9 aa, Homo Sapiens
FFKERVMEI

SEQ ID NO: 168398 - protein, 9 aa, Homo Sapiens
FFLARPTTF

SEQ ID NO: 168399 - protein, 9 aa, Homo Sapiens
FFMEKRAKY

SEQ ID NO: 168400 - protein, 9 aa, Homo Sapiens
FFMERSWSV

SEQ ID NO: 168401 - protein, 9 aa, Homo Sapiens
FFMLRSLSL

SEQ ID NO: 168402 - protein, 9 aa, Homo Sapiens
FFNGLRTEL

SEQ ID NO: 168403 - protein, 9 aa, Homo Sapiens
FFNNRIIAI

SEQ ID NO: 168404 - protein, 9 aa, Homo Sapiens
FFQDKARFY

SEQ ID NO: 168405 - protein, 9 aa, Homo Sapiens
FFQETNIPY

SEQ ID NO: 168406 - protein, 9 aa, Homo Sapiens
FFSEREASF

SEQ ID NO: 168407 - protein, 9 aa, Homo Sapiens
FFVNRPDSY

SEQ ID NO: 168408 - protein, 9 aa, Homo Sapiens
FFYQRLVEF

SEQ ID NO: 168409 - protein, 9 aa, Homo Sapiens
FGAVQVTPL

SEQ ID NO: 168410 - protein, 9 aa, Homo Sapiens
FGEVRPYFY

SEQ ID NO: 168411 - protein, 9 aa, Homo Sapiens
FGFHKPKMY

SEQ ID NO: 168412 - protein, 9 aa, Homo Sapiens
FGFVRFTEY

SEQ ID NO: 168413 - protein, 9 aa, Homo Sapiens
FGIYRFLPF

SEQ ID NO: 168414 - protein, 9 aa, Homo Sapiens
FGKDYLLEM

SEQ ID NO: 168415 - protein, 9 aa, Homo Sapiens
FGKGYFLEI

SEQ ID NO: 168416 - protein, 9 aa, Homo Sapiens
FGKPYFIKL

SEQ ID NO: 168417 - protein, 9 aa, Homo Sapiens
FGLARAFSL

SEQ ID NO: 168418 - protein, 9 aa, Homo Sapiens
FGLARIYSF

SEQ ID NO: 168419 - protein, 9 aa, Homo Sapiens
FGLARIYSY

SEQ ID NO: 168420 - protein, 9 aa, Homo Sapiens
FGMDDREIM

SEQ ID NO: 168421 - protein, 9 aa, Homo Sapiens
FGNNKLTTF

SEQ ID NO: 168422 - protein, 9 aa, Homo Sapiens
FGQLRDFYF

SEQ ID NO: 168423 - protein, 9 aa, Homo Sapiens
FGSEVIKVY

SEQ ID NO: 168424 - protein, 9 aa, Homo Sapiens
FGSLPKVAL

SEQ ID NO: 168425 - protein, 9 aa, Homo Sapiens
FGSNIAHMY

SEQ ID NO: 168426 - protein, 9 aa, Homo Sapiens
FGTEHVLRI

SEQ ID NO: 168427 - protein, 9 aa, Homo Sapiens
FGTGFPHML

SEQ ID NO: 168428 - protein, 9 aa, Homo Sapiens
FGTIRTIDY

SEQ ID NO: 168429 - protein, 9 aa, Homo Sapiens
FGTSHPRYY

SEQ ID NO: 168430 - protein, 9 aa, Homo Sapiens
FIAPNKYEY

SEQ ID NO: 168431 - protein, 9 aa, Homo Sapiens
FIFLRLNVL

SEQ ID NO: 168432 - protein, 9 aa, Homo Sapiens
FIISRTQAL

SEQ ID NO: 168433 - protein, 9 aa, Homo Sapiens
FIKEIPPEL

SEQ ID NO: 168434 - protein, 9 aa, Homo Sapiens
FIMDRAQAL

SEQ ID NO: 168435 - protein, 9 aa, Homo Sapiens
FIMGKTIEF

SEQ ID NO: 168436 - protein, 9 aa, Homo Sapiens
FIMINPLEY

SEQ ID NO: 168437 - protein, 9 aa, Homo Sapiens
FINQNLRTY

SEQ ID NO: 168438 - protein, 9 aa, Homo Sapiens
FIQTRGGTF

SEQ ID NO: 168439 - protein, 9 aa, Homo Sapiens
FIRKVFLVL

SEQ ID NO: 168440 - protein, 9 aa, Homo Sapiens
FIRPFMLLL

SEQ ID NO: 168441 - protein, 9 aa, Homo Sapiens
FISIPKMEV

SEQ ID NO: 168442 - protein, 9 aa, Homo Sapiens
FISSTFRDM

SEQ ID NO: 168443 - protein, 9 aa, Homo Sapiens
FITGLIRIM

SEQ ID NO: 168444 - protein, 9 aa, Homo Sapiens
FITPIVKVS

SEQ ID NO: 168445 - protein, 9 aa, Homo Sapiens
FITYVEHVL

SEQ ID NO: 168446 - protein, 9 aa, Homo Sapiens
FIVDARPAM

SEQ ID NO: 168447 - protein, 9 aa, Homo Sapiens
FIVEETLPL

SEQ ID NO: 168448 - protein, 9 aa, Homo Sapiens
FIYHLPQEF

SEQ ID NO: 168449 - protein, 9 aa, Homo Sapiens
FLAKSRPEL

SEQ ID NO: 168450 - protein, 9 aa, Homo Sapiens
FLANVRKAF

SEQ ID NO: 168451 - protein, 9 aa, Homo Sapiens
FLCPFHLSV

SEQ ID NO: 168452 - protein, 9 aa, Homo Sapiens
FLGERVFPF

SEQ ID NO: 168453 - protein, 9 aa, Homo Sapiens
FLGIRFAEY

SEQ ID NO: 168454 - protein, 9 aa, Homo Sapiens
FLGPLHPSF

SEQ ID NO: 168455 - protein, 9 aa, Homo Sapiens
FLIEPFVPH

SEQ ID NO: 168456 - protein, 9 aa, Homo Sapiens
FLPEAPAEL

SEQ ID NO: 168457 - protein, 9 aa, Homo Sapiens
FLQQPRPLM

SEQ ID NO: 168458 - protein, 9 aa, Homo Sapiens
FLREWVESM

SEQ ID NO: 168459 - protein, 9 aa, Homo Sapiens
FLSIGARYY

SEQ ID NO: 168460 - protein, 9 aa, Homo Sapiens
FLSPLFRFY

SEQ ID NO: 168461 - protein, 9 aa, Homo Sapiens
FLTELTRLF

SEQ ID NO: 168462 - protein, 9 aa, Homo Sapiens
FLTVTRLYF

SEQ ID NO: 168463 - protein, 9 aa, Homo Sapiens
FLVLRQQQF

SEQ ID NO: 168464 - protein, 9 aa, Homo Sapiens
FLYGRLYEF

SEQ ID NO: 168465 - protein, 9 aa, Homo Sapiens
FLYPFFGVL

SEQ ID NO: 168466 - protein, 9 aa, Homo Sapiens
FLYPFPLAL

SEQ ID NO: 168467 - protein, 9 aa, Homo Sapiens
FMMMRAENF

SEQ ID NO: 168468 - protein, 9 aa, Homo Sapiens
FNFLRNVSL

SEQ ID NO: 168469 - protein, 9 aa, Homo Sapiens
FNHILPYFY

SEQ ID NO: 168470 - protein, 9 aa, Homo Sapiens
FNITRIVTF

SEQ ID NO: 168471 - protein, 9 aa, Homo Sapiens
FNSVRLWDF

SEQ ID NO: 168472 - protein, 9 aa, Homo Sapiens
FNYQKRVSF

SEQ ID NO: 168473 - protein, 9 aa, Homo Sapiens
FQAFLRTEF

SEQ ID NO: 168474 - protein, 9 aa, Homo Sapiens
FQAPTAKEM

SEQ ID NO: 168475 - protein, 9 aa, Homo Sapiens
FQGFRLVPF

SEQ ID NO: 168476 - protein, 9 aa, Homo Sapiens
FQNDFLRLL

SEQ ID NO: 168477 - protein, 9 aa, Homo Sapiens
FQNPFRSEL

SEQ ID NO: 168478 - protein, 9 aa, Homo Sapiens
FQRDYYDRM

SEQ ID NO: 168479 - protein, 9 aa, Homo Sapiens
FQREFALRL

SEQ ID NO: 168480 - protein, 9 aa, Homo Sapiens
FQRPNALAV

SEQ ID NO: 168481 - protein, 9 aa, Homo Sapiens
FQRQFVLTL

SEQ ID NO: 168482 - protein, 9 aa, Homo Sapiens
FQSQFERLV

SEQ ID NO: 168483 - protein, 9 aa, Homo Sapiens
FQTIARNAL

SEQ ID NO: 168484 - protein, 9 aa, Homo Sapiens
FQTSRYKLH

SEQ ID NO: 168485 - protein, 9 aa, Homo Sapiens
FQTVTDYGK

SEQ ID NO: 168486 - protein, 9 aa, Homo Sapiens
FSAEFLKVF

SEQ ID NO: 168487 - protein, 9 aa, Homo Sapiens
FSAFLEKEY

SEQ ID NO: 168488 - protein, 9 aa, Homo Sapiens
FSAGEPRVL

SEQ ID NO: 168489 - protein, 9 aa, Homo Sapiens
FSALITRIF

SEQ ID NO: 168490 - protein, 9 aa, Homo Sapiens
FSAMFEHEM

SEQ ID NO: 168491 - protein, 9 aa, Homo Sapiens
FSAPRHGSL

SEQ ID NO: 168492 - protein, 9 aa, Homo Sapiens
FSATFPKEI

SEQ ID NO: 168493 - protein, 9 aa, Homo Sapiens
FSATFPRAM

SEQ ID NO: 168494 - protein, 9 aa, Homo Sapiens
FSAVMVRLM

SEQ ID NO: 168495 - protein, 9 aa, Homo Sapiens
FSAYNYRTY

SEQ ID NO: 168496 - protein, 9 aa, Homo Sapiens
FSEPFHLIV

SEQ ID NO: 168497 - protein, 9 aa, Homo Sapiens
FSEPHARFY

SEQ ID NO: 168498 - protein, 9 aa, Homo Sapiens
FSESHLVII

SEQ ID NO: 168499 - protein, 9 aa, Homo Sapiens
FSFHHVLSL

SEQ ID NO: 168500 - protein, 9 aa, Homo Sapiens
FSFVRITAL

SEQ ID NO: 168501 - protein, 9 aa, Homo Sapiens
FSFVRVISL

SEQ ID NO: 168502 - protein, 9 aa, Homo Sapiens
FSFYFHEAL

SEQ ID NO: 168503 - protein, 9 aa, Homo Sapiens
FSGIRNISF

SEQ ID NO: 168504 - protein, 9 aa, Homo Sapiens
FSHAQTVVL

SEQ ID NO: 168505 - protein, 9 aa, Homo Sapiens
FSHFYIISV

SEQ ID NO: 168506 - protein, 9 aa, Homo Sapiens
FSIEKRFAY

SEQ ID NO: 168507 - protein, 9 aa, Homo Sapiens
FSIEPWLKV

SEQ ID NO: 168508 - protein, 9 aa, Homo Sapiens
FSIPDSLLI

SEQ ID NO: 168509 - protein, 9 aa, Homo Sapiens
FSKDWSFYL

SEQ ID NO: 168510 - protein, 9 aa, Homo Sapiens
FSKPPNPAL

SEQ ID NO: 168511 - protein, 9 aa, Homo Sapiens
FSLAPYRDY

SEQ ID NO: 168512 - protein, 9 aa, Homo Sapiens
FSLVNQIYY

SEQ ID NO: 168513 - protein, 9 aa, Homo Sapiens
FSMYKPITY

SEQ ID NO: 168514 - protein, 9 aa, Homo Sapiens
FSNDALKTY

SEQ ID NO: 168515 - protein, 9 aa, Homo Sapiens
FSNDIPHVV

SEQ ID NO: 168516 - protein, 9 aa, Homo Sapiens
FSNFWYHSY

SEQ ID NO: 168517 - protein, 9 aa, Homo Sapiens
FSNGHIKVL

SEQ ID NO: 168518 - protein, 9 aa, Homo Sapiens
FSNITGIDY

SEQ ID NO: 168519 - protein, 9 aa, Homo Sapiens
FSNPFFVNY

SEQ ID NO: 168520 - protein, 9 aa, Homo Sapiens
FSNPNIQKI

SEQ ID NO: 168521 - protein, 9 aa, Homo Sapiens
FSNPRALYL

SEQ ID NO: 168522 - protein, 9 aa, Homo Sapiens
FSNPYSIEY

SEQ ID NO: 168523 - protein, 9 aa, Homo Sapiens
FSNWGHPEY

SEQ ID NO: 168524 - protein, 9 aa, Homo Sapiens
FSPFHASVL

SEQ ID NO: 168525 - protein, 9 aa, Homo Sapiens
FSQINLREY

SEQ ID NO: 168526 - protein, 9 aa, Homo Sapiens
FSQIRKDAL

SEQ ID NO: 168527 - protein, 9 aa, Homo Sapiens
FSQVIPVSL

SEQ ID NO: 168528 - protein, 9 aa, Homo Sapiens
FSRLYLNVL

SEQ ID NO: 168529 - protein, 9 aa, Homo Sapiens
FSRSDHLAL

SEQ ID NO: 168530 - protein, 9 aa, Homo Sapiens
FSSDLQKTF

SEQ ID NO: 168531 - protein, 9 aa, Homo Sapiens
FSSDNRQIV

SEQ ID NO: 168532 - protein, 9 aa, Homo Sapiens
FSSDVTHEM

SEQ ID NO: 168533 - protein, 9 aa, Homo Sapiens
FSSENVKVF

SEQ ID NO: 168534 - protein, 9 aa, Homo Sapiens
FSSERLFSW

SEQ ID NO: 168535 - protein, 9 aa, Homo Sapiens
FSSGAIQVV

SEQ ID NO: 168536 - protein, 9 aa, Homo Sapiens
FSSLKLNVY

SEQ ID NO: 168537 - protein, 9 aa, Homo Sapiens
FSSPAVYVL

SEQ ID NO: 168538 - protein, 9 aa, Homo Sapiens
FSSPHLQML

SEQ ID NO: 168539 - protein, 9 aa, Homo Sapiens
FSSPVCMAF

SEQ ID NO: 168540 - protein, 9 aa, Homo Sapiens
FSSWVQLEV

SEQ ID NO: 168541 - protein, 9 aa, Homo Sapiens
FSTDSPRLL

SEQ ID NO: 168542 - protein, 9 aa, Homo Sapiens
FSTLYGRVL

SEQ ID NO: 168543 - protein, 9 aa, Homo Sapiens
FSTNLQRLM

SEQ ID NO: 168544 - protein, 9 aa, Homo Sapiens
FSTPPRQVL

SEQ ID NO: 168545 - protein, 9 aa, Homo Sapiens
FSTSLVHSI

SEQ ID NO: 168546 - protein, 9 aa, Homo Sapiens
FSTSTGRVY

SEQ ID NO: 168547 - protein, 9 aa, Homo Sapiens
FSTSVVRPF

SEQ ID NO: 168548 - protein, 9 aa, Homo Sapiens
FSTVKGVEL

SEQ ID NO: 168549 - protein, 9 aa, Homo Sapiens
FSTVVIHFL

SEQ ID NO: 168550 - protein, 9 aa, Homo Sapiens
FSVDSPRIY

SEQ ID NO: 168551 - protein, 9 aa, Homo Sapiens
FSVEGQLEF

SEQ ID NO: 168552 - protein, 9 aa, Homo Sapiens
FSVEQITAM

SEQ ID NO: 168553 - protein, 9 aa, Homo Sapiens
FSVNLFRTL

SEQ ID NO: 168554 - protein, 9 aa, Homo Sapiens
FSVVQPSSF

SEQ ID NO: 168555 - protein, 9 aa, Homo Sapiens
FSVVSPSSF

SEQ ID NO: 168556 - protein, 9 aa, Homo Sapiens
FSYAFPKAV

SEQ ID NO: 168557 - protein, 9 aa, Homo Sapiens
FSYAFPKEF

SEQ ID NO: 168558 - protein, 9 aa, Homo Sapiens
FSYVTPRAF

SEQ ID NO: 168559 - protein, 9 aa, Homo Sapiens
FTADFVRQL

SEQ ID NO: 168560 - protein, 9 aa, Homo Sapiens
FTAEMARVL

SEQ ID NO: 168561 - protein, 9 aa, Homo Sapiens
FTAERSSYY

SEQ ID NO: 168562 - protein, 9 aa, Homo Sapiens
FTAQPKPAT

SEQ ID NO: 168563 - protein, 9 aa, Homo Sapiens
FTGPLRPFF

SEQ ID NO: 168564 - protein, 9 aa, Homo Sapiens
FTHLYTLIV

SEQ ID NO: 168565 - protein, 9 aa, Homo Sapiens
FTHSQFIVV

SEQ ID NO: 168566 - protein, 9 aa, Homo Sapiens
FTIFRTISV

SEQ ID NO: 168567 - protein, 9 aa, Homo Sapiens
FTITKTVEY

SEQ ID NO: 168568 - protein, 9 aa, Homo Sapiens
FTKEQIREL

SEQ ID NO: 168569 - protein, 9 aa, Homo Sapiens
FTKGIPNVL

SEQ ID NO: 168570 - protein, 9 aa, Homo Sapiens
FTMEMVRQY

SEQ ID NO: 168571 - protein, 9 aa, Homo Sapiens
FTMPLHMTF

SEQ ID NO: 168572 - protein, 9 aa, Homo Sapiens
FTNPKVREW

SEQ ID NO: 168573 - protein, 9 aa, Homo Sapiens
FTNPWTKEL

SEQ ID NO: 168574 - protein, 9 aa, Homo Sapiens
FTREHYMEL

SEQ ID NO: 168575 - protein, 9 aa, Homo Sapiens
FTSAAFHEL

SEQ ID NO: 168576 - protein, 9 aa, Homo Sapiens
FTSDPKPTI

SEQ ID NO: 168577 - protein, 9 aa, Homo Sapiens
FTSEKFLVM

SEQ ID NO: 168578 - protein, 9 aa, Homo Sapiens
FTSKLHRMY

SEQ ID NO: 168579 - protein, 9 aa, Homo Sapiens
FTSNAFRKL

SEQ ID NO: 168580 - protein, 9 aa, Homo Sapiens
FTSPAVKRL

SEQ ID NO: 168581 - protein, 9 aa, Homo Sapiens
FTSPFCLQV

SEQ ID NO: 168582 - protein, 9 aa, Homo Sapiens
FTSQVIRNL

SEQ ID NO: 168583 - protein, 9 aa, Homo Sapiens
FTSYWIHWV

SEQ ID NO: 168584 - protein, 9 aa, Homo Sapiens
FTTAQKRVY

SEQ ID NO: 168585 - protein, 9 aa, Homo Sapiens
FTTKRPNTF

SEQ ID NO: 168586 - protein, 9 aa, Homo Sapiens
FTTNKKVSF

SEQ ID NO: 168587 - protein, 9 aa, Homo Sapiens
FTTSILRHW

SEQ ID NO: 168588 - protein, 9 aa, Homo Sapiens
FTTSNIRKV

SEQ ID NO: 168589 - protein, 9 aa, Homo Sapiens
FTTTAEREI

SEQ ID NO: 168590 - protein, 9 aa, Homo Sapiens
FTVDQIRAI

SEQ ID NO: 168591 - protein, 9 aa, Homo Sapiens
FTVNPKGEL

SEQ ID NO: 168592 - protein, 9 aa, Homo Sapiens
FTVPHTHVF

SEQ ID NO: 168593 - protein, 9 aa, Homo Sapiens
FTVVRVINF

SEQ ID NO: 168594 - protein, 9 aa, Homo Sapiens
FTYLEINPL

SEQ ID NO: 168595 - protein, 9 aa, Homo Sapiens
FVAEQKVEY

SEQ ID NO: 168596 - protein, 9 aa, Homo Sapiens
FVHDLVLYL

SEQ ID NO: 168597 - protein, 9 aa, Homo Sapiens
FVIETARQL

SEQ ID NO: 168598 - protein, 9 aa, Homo Sapiens
FVIQLGRIY

SEQ ID NO: 168599 - protein, 9 aa, Homo Sapiens
FVIRPSRFY

SEQ ID NO: 168600 - protein, 9 aa, Homo Sapiens
FVITFPRAY

SEQ ID NO: 168601 - protein, 9 aa, Homo Sapiens
FVITKPDVY

SEQ ID NO: 168602 - protein, 9 aa, Homo Sapiens
FVKEHFDEL

SEQ ID NO: 168603 - protein, 9 aa, Homo Sapiens
FVKFFIIGV

SEQ ID NO: 168604 - protein, 9 aa, Homo Sapiens
FVKPAVVTV

SEQ ID NO: 168605 - protein, 9 aa, Homo Sapiens
FVKPEFLLL

SEQ ID NO: 168606 - protein, 9 aa, Homo Sapiens
FVMETFVHL

SEQ ID NO: 168607 - protein, 9 aa, Homo Sapiens
FVNDYILYY

SEQ ID NO: 168608 - protein, 9 aa, Homo Sapiens
FVNPSLRVL

SEQ ID NO: 168609 - protein, 9 aa, Homo Sapiens
FVNPTSFVY

SEQ ID NO: 168610 - protein, 9 aa, Homo Sapiens
FVQLMPILI

SEQ ID NO: 168611 - protein, 9 aa, Homo Sapiens
FVQQRYLSY

SEQ ID NO: 168612 - protein, 9 aa, Homo Sapiens
FVQVPGRVV

SEQ ID NO: 168613 - protein, 9 aa, Homo Sapiens
FVRDMIREV

SEQ ID NO: 168614 - protein, 9 aa, Homo Sapiens
FVRDYMAVL

SEQ ID NO: 168615 - protein, 9 aa, Homo Sapiens
FVRPYSDYL

SEQ ID NO: 168616 - protein, 9 aa, Homo Sapiens
FVSERKPAL

SEQ ID NO: 168617 - protein, 9 aa, Homo Sapiens
FVTFSTRAM

SEQ ID NO: 168618 - protein, 9 aa, Homo Sapiens
FVTFTTRAM

SEQ ID NO: 168619 - protein, 9 aa, Homo Sapiens
FVTFYTRKA

SEQ ID NO: 168620 - protein, 9 aa, Homo Sapiens
FVTPHPRRI

SEQ ID NO: 168621 - protein, 9 aa, Homo Sapiens
FVTYVVREH

SEQ ID NO: 168622 - protein, 9 aa, Homo Sapiens
FVVTFPRAY

SEQ ID NO: 168623 - protein, 9 aa, Homo Sapiens
FVYLRQPYY

SEQ ID NO: 168624 - protein, 9 aa, Homo Sapiens
FWAPVPRVL

SEQ ID NO: 168625 - protein, 9 aa, Homo Sapiens
FYNNRLQAY

SEQ ID NO: 168626 - protein, 9 aa, Homo Sapiens
GAFLREYLY

SEQ ID NO: 168627 - protein, 9 aa, Homo Sapiens
GARWYSMEM

SEQ ID NO: 168628 - protein, 9 aa, Homo Sapiens
GASQLFRIW

SEQ ID NO: 168629 - protein, 9 aa, Homo Sapiens
GFQNALIVR

SEQ ID NO: 168630 - protein, 9 aa, Homo Sapiens
GFQVRMFEF

SEQ ID NO: 168631 - protein, 9 aa, Homo Sapiens
GLSPARLAV

SEQ ID NO: 168632 - protein, 9 aa, Homo Sapiens
GMLLRLEEF

SEQ ID NO: 168633 - protein, 9 aa, Homo Sapiens
GNYYKPWFF

SEQ ID NO: 168634 - protein, 9 aa, Homo Sapiens
GQWLRRVSY

SEQ ID NO: 168635 - protein, 9 aa, Homo Sapiens
GRTGPRAPL

SEQ ID NO: 168636 - protein, 9 aa, Homo Sapiens
GSFLRIYSL

SEQ ID NO: 168637 - protein, 9 aa, Homo Sapiens
GYAILRVSL

SEQ ID NO: 168638 - protein, 9 aa, Homo Sapiens
HAAGFAYTY

SEQ ID NO: 168639 - protein, 9 aa, Homo Sapiens
HAAHFARAF

SEQ ID NO: 168640 - protein, 9 aa, Homo Sapiens
HAAPFQNIL

SEQ ID NO: 168641 - protein, 9 aa, Homo Sapiens
HAAPFSKVL

SEQ ID NO: 168642 - protein, 9 aa, Homo Sapiens
HAASVFLTL

SEQ ID NO: 168643 - protein, 9 aa, Homo Sapiens
HAATIRLIF

SEQ ID NO: 168644 - protein, 9 aa, Homo Sapiens
HAIKSVKIY

SEQ ID NO: 168645 - protein, 9 aa, Homo Sapiens
HAIPPTLAM

SEQ ID NO: 168646 - protein, 9 aa, Homo Sapiens
HAISRYWYY

SEQ ID NO: 168647 - protein, 9 aa, Homo Sapiens
HAKEYIQQL

SEQ ID NO: 168648 - protein, 9 aa, Homo Sapiens
HAKGFGMTL

SEQ ID NO: 168649 - protein, 9 aa, Homo Sapiens
HAKMIFMEL

SEQ ID NO: 168650 - protein, 9 aa, Homo Sapiens
HAKPPTPSL

SEQ ID NO: 168651 - protein, 9 aa, Homo Sapiens
HALERLFTM

SEQ ID NO: 168652 - protein, 9 aa, Homo Sapiens
HANYQPVEI

SEQ ID NO: 168653 - protein, 9 aa, Homo Sapiens
HAPFTATSL

SEQ ID NO: 168654 - protein, 9 aa, Homo Sapiens
HARFYFLFH

SEQ ID NO: 168655 - protein, 9 aa, Homo Sapiens
HARLAPPSL

SEQ ID NO: 168656 - protein, 9 aa, Homo Sapiens
HASDRIIAL

SEQ ID NO: 168657 - protein, 9 aa, Homo Sapiens
HASTLHRLY

SEQ ID NO: 168658 - protein, 9 aa, Homo Sapiens
HATQAIFEI

SEQ ID NO: 168659 - protein, 9 aa, Homo Sapiens
HATTYIPLM

SEQ ID NO: 168660 - protein, 9 aa, Homo Sapiens
HAVLRVVDF

SEQ ID NO: 168661 - protein, 9 aa, Homo Sapiens
HCTGHIHVY

SEQ ID NO: 168662 - protein, 9 aa, Homo Sapiens
HDNEETFLK

SEQ ID NO: 168663 - protein, 9 aa, Homo Sapiens
HFNPKIESY

SEQ ID NO: 168664 - protein, 9 aa, Homo Sapiens
HFQIRNVTF

SEQ ID NO: 168665 - protein, 9 aa, Homo Sapiens
HFYMRKVKF

SEQ ID NO: 168666 - protein, 9 aa, Homo Sapiens
HGAEPLPYY

SEQ ID NO: 168667 - protein, 9 aa, Homo Sapiens
HIRESLPAL

SEQ ID NO: 168668 - protein, 9 aa, Homo Sapiens
HLPSGVKSL

SEQ ID NO: 168669 - protein, 9 aa, Homo Sapiens
HNALRILTF

SEQ ID NO: 168670 - protein, 9 aa, Homo Sapiens
HNSWQVVAM

SEQ ID NO: 168671 - protein, 9 aa, Homo Sapiens
HQRTFVLEV

SEQ ID NO: 168672 - protein, 9 aa, Homo Sapiens
HSFLKALYY

SEQ ID NO: 168673 - protein, 9 aa, Homo Sapiens
HSGPLRVAM

SEQ ID NO: 168674 - protein, 9 aa, Homo Sapiens
HSIVRLVAF

SEQ ID NO: 168675 - protein, 9 aa, Homo Sapiens
HSSMPRPDY

SEQ ID NO: 168676 - protein, 9 aa, Homo Sapiens
HSTVHLIEF

SEQ ID NO: 168677 - protein, 9 aa, Homo Sapiens
HTQTRLLSM

SEQ ID NO: 168678 - protein, 9 aa, Homo Sapiens
HTTILRPSY

SEQ ID NO: 168679 - protein, 9 aa, Homo Sapiens
IAAERWIKF

SEQ ID NO: 168680 - protein, 9 aa, Homo Sapiens
IAAMPLISL

SEQ ID NO: 168681 - protein, 9 aa, Homo Sapiens
IAAPDSRRW

SEQ ID NO: 168682 - protein, 9 aa, Homo Sapiens
IAASYVKYL

SEQ ID NO: 168683 - protein, 9 aa, Homo Sapiens
IAFFDVRTF

SEQ ID NO: 168684 - protein, 9 aa, Homo Sapiens
IAFLMINAV

SEQ ID NO: 168685 - protein, 9 aa, Homo Sapiens
IAFSRPVKY

SEQ ID NO: 168686 - protein, 9 aa, Homo Sapiens
IAFVRLPSL

SEQ ID NO: 168687 - protein, 9 aa, Homo Sapiens
IAIDWEPEM

SEQ ID NO: 168688 - protein, 9 aa, Homo Sapiens
IAIEPGAAL

SEQ ID NO: 168689 - protein, 9 aa, Homo Sapiens
IAIEVLHLL

SEQ ID NO: 168690 - protein, 9 aa, Homo Sapiens
IAIPVTVAF

SEQ ID NO: 168691 - protein, 9 aa, Homo Sapiens
IAISGTFAY

SEQ ID NO: 168692 - protein, 9 aa, Homo Sapiens
IAISLGKIF

SEQ ID NO: 168693 - protein, 9 aa, Homo Sapiens
IAISRTPVL

SEQ ID NO: 168694 - protein, 9 aa, Homo Sapiens
IAKNVFLHL

SEQ ID NO: 168695 - protein, 9 aa, Homo Sapiens
IALGFYRFW

SEQ ID NO: 168696 - protein, 9 aa, Homo Sapiens
IAMDLILKM

SEQ ID NO: 168697 - protein, 9 aa, Homo Sapiens
IAMGMAQAL

SEQ ID NO: 168698 - protein, 9 aa, Homo Sapiens
IAMPLHMIF

SEQ ID NO: 168699 - protein, 9 aa, Homo Sapiens
IANAVVKEL

SEQ ID NO: 168700 - protein, 9 aa, Homo Sapiens
IANDRFINM

SEQ ID NO: 168701 - protein, 9 aa, Homo Sapiens
IANQRITAF

SEQ ID NO: 168702 - protein, 9 aa, Homo Sapiens
IANTLYRIF

SEQ ID NO: 168703 - protein, 9 aa, Homo Sapiens
IAPGVTHEL

SEQ ID NO: 168704 - protein, 9 aa, Homo Sapiens
IAQAVPHIL

SEQ ID NO: 168705 - protein, 9 aa, Homo Sapiens
IAQDFKTDL

SEQ ID NO: 168706 - protein, 9 aa, Homo Sapiens
IAQDQPKIL

SEQ ID NO: 168707 - protein, 9 aa, Homo Sapiens
IAQLYGRLY

SEQ ID NO: 168708 - protein, 9 aa, Homo Sapiens
IAQRYLLQY

SEQ ID NO: 168709 - protein, 9 aa, Homo Sapiens
IAREWFFLL

SEQ ID NO: 168710 - protein, 9 aa, Homo Sapiens
IARIPPVAV

SEQ ID NO: 168711 - protein, 9 aa, Homo Sapiens
IARPFIEAL

SEQ ID NO: 168712 - protein, 9 aa, Homo Sapiens
IASEVARKL

SEQ ID NO: 168713 - protein, 9 aa, Homo Sapiens
IASEVLKLF

SEQ ID NO: 168714 - protein, 9 aa, Homo Sapiens
IASIHSFEL

SEQ ID NO: 168715 - protein, 9 aa, Homo Sapiens
IASLIPTPR

SEQ ID NO: 168716 - protein, 9 aa, Homo Sapiens
IASNYHLEV

SEQ ID NO: 168717 - protein, 9 aa, Homo Sapiens
IASPVIAAV

SEQ ID NO: 168718 - protein, 9 aa, Homo Sapiens
IASPVQPVL

SEQ ID NO: 168719 - protein, 9 aa, Homo Sapiens
IASQRLTPL

SEQ ID NO: 168720 - protein, 9 aa, Homo Sapiens
IASSYMYEM

SEQ ID NO: 168721 - protein, 9 aa, Homo Sapiens
IASTLVHKF

SEQ ID NO: 168722 - protein, 9 aa, Homo Sapiens
IATDIIHLH

SEQ ID NO: 168723 - protein, 9 aa, Homo Sapiens
IATEIILEI

SEQ ID NO: 168724 - protein, 9 aa, Homo Sapiens
IATFWNKAF

SEQ ID NO: 168725 - protein, 9 aa, Homo Sapiens
IATGILHLL

SEQ ID NO: 168726 - protein, 9 aa, Homo Sapiens
IATIKNISM

SEQ ID NO: 168727 - protein, 9 aa, Homo Sapiens
IATKDVRIF

SEQ ID NO: 168728 - protein, 9 aa, Homo Sapiens
IATLRAYVL

SEQ ID NO: 168729 - protein, 9 aa, Homo Sapiens
IATLRKYTY

SEQ ID NO: 168730 - protein, 9 aa, Homo Sapiens
IATPFIKLF

SEQ ID NO: 168731 - protein, 9 aa, Homo Sapiens
IATQVVVEK

SEQ ID NO: 168732 - protein, 9 aa, Homo Sapiens
IATSQNRIY

SEQ ID NO: 168733 - protein, 9 aa, Homo Sapiens
IAVEPVKTY

SEQ ID NO: 168734 - protein, 9 aa, Homo Sapiens
IAVGLVRAY

SEQ ID NO: 168735 - protein, 9 aa, Homo Sapiens
IAVIKGLTY

SEQ ID NO: 168736 - protein, 9 aa, Homo Sapiens
IAVLQAEVY

SEQ ID NO: 168737 - protein, 9 aa, Homo Sapiens
IAVLRGLAY

SEQ ID NO: 168738 - protein, 9 aa, Homo Sapiens
IAVPEARFL

SEQ ID NO: 168739 - protein, 9 aa, Homo Sapiens
IAVSIVRAL

SEQ ID NO: 168740 - protein, 9 aa, Homo Sapiens
IAYIRDLAL

SEQ ID NO: 168741 - protein, 9 aa, Homo Sapiens
IAYIRITQY

SEQ ID NO: 168742 - protein, 9 aa, Homo Sapiens
IAYSRPVYF

SEQ ID NO: 168743 - protein, 9 aa, Homo Sapiens
ICADPRVPW

SEQ ID NO: 168744 - protein, 9 aa, Homo Sapiens
IFFTRAVQF

SEQ ID NO: 168745 - protein, 9 aa, Homo Sapiens
IFGLRPVDY

SEQ ID NO: 168746 - protein, 9 aa, Homo Sapiens
IFLIRHSQY

SEQ ID NO: 168747 - protein, 9 aa, Homo Sapiens
IFMENRNEF

SEQ ID NO: 168748 - protein, 9 aa, Homo Sapiens
IFSIREVSF

SEQ ID NO: 168749 - protein, 9 aa, Homo Sapiens
IFSPEGRLY

SEQ ID NO: 168750 - protein, 9 aa, Homo Sapiens
IFVARLYYF

SEQ ID NO: 168751 - protein, 9 aa, Homo Sapiens
IGALRENTF

SEQ ID NO: 168752 - protein, 9 aa, Homo Sapiens
IGSPFLRAY

SEQ ID NO: 168753 - protein, 9 aa, Homo Sapiens
IGSSFPRMF

SEQ ID NO: 168754 - protein, 9 aa, Homo Sapiens
IGYARQYVY

SEQ ID NO: 168755 - protein, 9 aa, Homo Sapiens
IIAEPGRYY

SEQ ID NO: 168756 - protein, 9 aa, Homo Sapiens
IIAPPERKY

SEQ ID NO: 168757 - protein, 9 aa, Homo Sapiens
IIHYRHQEF

SEQ ID NO: 168758 - protein, 9 aa, Homo Sapiens
IIKNIWIPM

SEQ ID NO: 168759 - protein, 9 aa, Homo Sapiens
IIREPLTEL

SEQ ID NO: 168760 - protein, 9 aa, Homo Sapiens
IISEFALEY

SEQ ID NO: 168761 - protein, 9 aa, Homo Sapiens
IITAFIRAL

SEQ ID NO: 168762 - protein, 9 aa, Homo Sapiens
IITDLLRSV

SEQ ID NO: 168763 - protein, 9 aa, Homo Sapiens
IIVDPAREL

SEQ ID NO: 168764 - protein, 9 aa, Homo Sapiens
IIYDRDFSY

SEQ ID NO: 168765 - protein, 9 aa, Homo Sapiens
ILHLRQVTF

SEQ ID NO: 168766 - protein, 9 aa, Homo Sapiens
ILMDPSPEY

SEQ ID NO: 168767 - protein, 9 aa, Homo Sapiens
ILSGVIRSV

SEQ ID NO: 168768 - protein, 9 aa, Homo Sapiens
ILSPPRPPT

SEQ ID NO: 168769 - protein, 9 aa, Homo Sapiens
ILTERGYSF

SEQ ID NO: 168770 - protein, 9 aa, Homo Sapiens
ILTLIPRLF

SEQ ID NO: 168771 - protein, 9 aa, Homo Sapiens
ILYEFPRVF

SEQ ID NO: 168772 - protein, 9 aa, Homo Sapiens
ILYIRNLPY

SEQ ID NO: 168773 - protein, 9 aa, Homo Sapiens
IMNTRHIAF

SEQ ID NO: 168774 - protein, 9 aa, Homo Sapiens
INTDLSRIL

SEQ ID NO: 168775 - protein, 9 aa, Homo Sapiens
INTFKLLSY

SEQ ID NO: 168776 - protein, 9 aa, Homo Sapiens
IQMGRFISF

SEQ ID NO: 168777 - protein, 9 aa, Homo Sapiens
IQRTPKIQV

SEQ ID NO: 168778 - protein, 9 aa, Homo Sapiens
ISAARLYYY

SEQ ID NO: 168779 - protein, 9 aa, Homo Sapiens
ISAPQERLY

SEQ ID NO: 168780 - protein, 9 aa, Homo Sapiens
ISIHRPLAY

SEQ ID NO: 168781 - protein, 9 aa, Homo Sapiens
ISIVRPFSI

SEQ ID NO: 168782 - protein, 9 aa, Homo Sapiens
ISKNYALQI

SEQ ID NO: 168783 - protein, 9 aa, Homo Sapiens
ISLFQIESL

SEQ ID NO: 168784 - protein, 9 aa, Homo Sapiens
ISLLKAVFY

SEQ ID NO: 168785 - protein, 9 aa, Homo Sapiens
ISNLRDVFY

SEQ ID NO: 168786 - protein, 9 aa, Homo Sapiens
ISNPNSIIL

SEQ ID NO: 168787 - protein, 9 aa, Homo Sapiens
ISNPVTKEM

SEQ ID NO: 168788 - protein, 9 aa, Homo Sapiens
ISQVFEIAL

SEQ ID NO: 168789 - protein, 9 aa, Homo Sapiens
ISRDPFYEM

SEQ ID NO: 168790 - protein, 9 aa, Homo Sapiens
ISSIREFGF

SEQ ID NO: 168791 - protein, 9 aa, Homo Sapiens
ISSPFMVVY

SEQ ID NO: 168792 - protein, 9 aa, Homo Sapiens
ISSPPFRAI

SEQ ID NO: 168793 - protein, 9 aa, Homo Sapiens
ISSPVILQF

SEQ ID NO: 168794 - protein, 9 aa, Homo Sapiens
ISTEFIHKL

SEQ ID NO: 168795 - protein, 9 aa, Homo Sapiens
ISTEKVNQL

SEQ ID NO: 168796 - protein, 9 aa, Homo Sapiens
ISTIRTQNL

SEQ ID NO: 168797 - protein, 9 aa, Homo Sapiens
ISTNTLRIL

SEQ ID NO: 168798 - protein, 9 aa, Homo Sapiens
ISTPNVNAL

SEQ ID NO: 168799 - protein, 9 aa, Homo Sapiens
ISTPVIRTF

SEQ ID NO: 168800 - protein, 9 aa, Homo Sapiens
ISVERVIEY

SEQ ID NO: 168801 - protein, 9 aa, Homo Sapiens
ISYYKPEFY

SEQ ID NO: 168802 - protein, 9 aa, Homo Sapiens
ITAPPSRVL

SEQ ID NO: 168803 - protein, 9 aa, Homo Sapiens
ITAPTVRQY

SEQ ID NO: 168804 - protein, 9 aa, Homo Sapiens
ITFEGKVAF

SEQ ID NO: 168805 - protein, 9 aa, Homo Sapiens
ITLLREISL

SEQ ID NO: 168806 - protein, 9 aa, Homo Sapiens
ITQGIPRSY

SEQ ID NO: 168807 - protein, 9 aa, Homo Sapiens
ITSPVHVSF

SEQ ID NO: 168808 - protein, 9 aa, Homo Sapiens
ITSSPHPEY

SEQ ID NO: 168809 - protein, 9 aa, Homo Sapiens
ITTLRKYTY

SEQ ID NO: 168810 - protein, 9 aa, Homo Sapiens
ITTPGVRFY

SEQ ID NO: 168811 - protein, 9 aa, Homo Sapiens
ITTTFRPEL

SEQ ID NO: 168812 - protein, 9 aa, Homo Sapiens
ITTTVTRVL

SEQ ID NO: 168813 - protein, 9 aa, Homo Sapiens
ITTVIQHVF

SEQ ID NO: 168814 - protein, 9 aa, Homo Sapiens
ITVGPRGPL

SEQ ID NO: 168815 - protein, 9 aa, Homo Sapiens
IVSLRLLSL

SEQ ID NO: 168816 - protein, 9 aa, Homo Sapiens
IVTELIRDY

SEQ ID NO: 168817 - protein, 9 aa, Homo Sapiens
IVTERLVAL

SEQ ID NO: 168818 - protein, 9 aa, Homo Sapiens
IWFEKRLAY

SEQ ID NO: 168819 - protein, 9 aa, Homo Sapiens
KAADFVKAF

SEQ ID NO: 168820 - protein, 9 aa, Homo Sapiens
KAADPVPSF

SEQ ID NO: 168821 - protein, 9 aa, Homo Sapiens
KAALAHPFF

SEQ ID NO: 168822 - protein, 9 aa, Homo Sapiens
KAAMLFRQY

SEQ ID NO: 168823 - protein, 9 aa, Homo Sapiens
KAASVRPVL

SEQ ID NO: 168824 - protein, 9 aa, Homo Sapiens
KAAVLLHLL

SEQ ID NO: 168825 - protein, 9 aa, Homo Sapiens
KAAVMVHQL

SEQ ID NO: 168826 - protein, 9 aa, Homo Sapiens
KAFARPWSL

SEQ ID NO: 168827 - protein, 9 aa, Homo Sapiens
KAFDQRLTF

SEQ ID NO: 168828 - protein, 9 aa, Homo Sapiens
KAFVFSVAL

SEQ ID NO: 168829 - protein, 9 aa, Homo Sapiens
KAIDYIKYL

SEQ ID NO: 168830 - protein, 9 aa, Homo Sapiens
KAIDYIRFL

SEQ ID NO: 168831 - protein, 9 aa, Homo Sapiens
KAIGLFISF

SEQ ID NO: 168832 - protein, 9 aa, Homo Sapiens
KALNRFEKL

SEQ ID NO: 168833 - protein, 9 aa, Homo Sapiens
KAMDDTFYL

SEQ ID NO: 168834 - protein, 9 aa, Homo Sapiens
KAMELIREL

SEQ ID NO: 168835 - protein, 9 aa, Homo Sapiens
KAMPYRLLL

SEQ ID NO: 168836 - protein, 9 aa, Homo Sapiens
KANAFLKEF

SEQ ID NO: 168837 - protein, 9 aa, Homo Sapiens
KANPALYVL

SEQ ID NO: 168838 - protein, 9 aa, Homo Sapiens
KAQDFYVEM

SEQ ID NO: 168839 - protein, 9 aa, Homo Sapiens
KASALLRLY

SEQ ID NO: 168840 - protein, 9 aa, Homo Sapiens
KASDAFHFF

SEQ ID NO: 168841 - protein, 9 aa, Homo Sapiens
KASDLYITL

SEQ ID NO: 168842 - protein, 9 aa, Homo Sapiens
KASGIIHSY

SEQ ID NO: 168843 - protein, 9 aa, Homo Sapiens
KASGTLREY

SEQ ID NO: 168844 - protein, 9 aa, Homo Sapiens
KASLRELAL

SEQ ID NO: 168845 - protein, 9 aa, Homo Sapiens
KASSITREL

SEQ ID NO: 168846 - protein, 9 aa, Homo Sapiens
KATAYILSV

SEQ ID NO: 168847 - protein, 9 aa, Homo Sapiens
KATEYIQYM

SEQ ID NO: 168848 - protein, 9 aa, Homo Sapiens
KATFHYRTL

SEQ ID NO: 168849 - protein, 9 aa, Homo Sapiens
KATFIIKII

SEQ ID NO: 168850 - protein, 9 aa, Homo Sapiens
KATNVVRLL

SEQ ID NO: 168851 - protein, 9 aa, Homo Sapiens
KATPIKLIW

SEQ ID NO: 168852 - protein, 9 aa, Homo Sapiens
KATPTTRLW

SEQ ID NO: 168853 - protein, 9 aa, Homo Sapiens
KATQNFKVM

SEQ ID NO: 168854 - protein, 9 aa, Homo Sapiens
KAVDQPRQL

SEQ ID NO: 168855 - protein, 9 aa, Homo Sapiens
KAVFVARVL

SEQ ID NO: 168856 - protein, 9 aa, Homo Sapiens
KAVIRVNVF

SEQ ID NO: 168857 - protein, 9 aa, Homo Sapiens
KAVSLFLCY

SEQ ID NO: 168858 - protein, 9 aa, Homo Sapiens
KAYERGISL

SEQ ID NO: 168859 - protein, 9 aa, Homo Sapiens
KAYFDVKEY

SEQ ID NO: 168860 - protein, 9 aa, Homo Sapiens
KAYLKKISM

SEQ ID NO: 168861 - protein, 9 aa, Homo Sapiens
KAYLREDFF

SEQ ID NO: 168862 - protein, 9 aa, Homo Sapiens
KAYVRVLDL

SEQ ID NO: 168863 - protein, 9 aa, Homo Sapiens
KCWLRYIEF

SEQ ID NO: 168864 - protein, 9 aa, Homo Sapiens
KEEVVTVET

SEQ ID NO: 168865 - protein, 9 aa, Homo Sapiens
KFDLRIYVY

SEQ ID NO: 168866 - protein, 9 aa, Homo Sapiens
KGAPPKVSY

SEQ ID NO: 168867 - protein, 9 aa, Homo Sapiens
KGSSAVRVY

SEQ ID NO: 168868 - protein, 9 aa, Homo Sapiens
KIDALNENK

SEQ ID NO: 168869 - protein, 9 aa, Homo Sapiens
KIINAFRYY

SEQ ID NO: 168870 - protein, 9 aa, Homo Sapiens
KILKDMRIF

SEQ ID NO: 168871 - protein, 9 aa, Homo Sapiens
KILNHPRVY

SEQ ID NO: 168872 - protein, 9 aa, Homo Sapiens
KINEAFIEM

SEQ ID NO: 168873 - protein, 9 aa, Homo Sapiens
KISSFIRKY

SEQ ID NO: 168874 - protein, 9 aa, Homo Sapiens
KITPWFKII

SEQ ID NO: 168875 - protein, 9 aa, Homo Sapiens
KLPGNISSL

SEQ ID NO: 168876 - protein, 9 aa, Homo Sapiens
KLSEIVREF

SEQ ID NO: 168877 - protein, 9 aa, Homo Sapiens
KLSELLRYY

SEQ ID NO: 168878 - protein, 9 aa, Homo Sapiens
KLSTYIRLY

SEQ ID NO: 168879 - protein, 9 aa, Homo Sapiens
KLTELLRYY

SEQ ID NO: 168880 - protein, 9 aa, Homo Sapiens
KMFLRGTFY

SEQ ID NO: 168881 - protein, 9 aa, Homo Sapiens
KNQAKLIEF

SEQ ID NO: 168882 - protein, 9 aa, Homo Sapiens
KQFHRIVTY

SEQ ID NO: 168883 - protein, 9 aa, Homo Sapiens
KSFFRRLSF

SEQ ID NO: 168884 - protein, 9 aa, Homo Sapiens
KSFVKVYNY

SEQ ID NO: 168885 - protein, 9 aa, Homo Sapiens
KSKDFVQVM

SEQ ID NO: 168886 - protein, 9 aa, Homo Sapiens
KSLWKHHEY

SEQ ID NO: 168887 - protein, 9 aa, Homo Sapiens
KSNPKPLVL

SEQ ID NO: 168888 - protein, 9 aa, Homo Sapiens
KSSDIAKTF

SEQ ID NO: 168889 - protein, 9 aa, Homo Sapiens
KSSWKRVSF

SEQ ID NO: 168890 - protein, 9 aa, Homo Sapiens
KSTAISLFY

SEQ ID NO: 168891 - protein, 9 aa, Homo Sapiens
KSTDVAKTF

SEQ ID NO: 168892 - protein, 9 aa, Homo Sapiens
KTFARYLSF

SEQ ID NO: 168893 - protein, 9 aa, Homo Sapiens
KTHLYTLIL

SEQ ID NO: 168894 - protein, 9 aa, Homo Sapiens
KTIDPKVAF

SEQ ID NO: 168895 - protein, 9 aa, Homo Sapiens
KTLDPKAVF

SEQ ID NO: 168896 - protein, 9 aa, Homo Sapiens
KTSDFLKVL

SEQ ID NO: 168897 - protein, 9 aa, Homo Sapiens
KTTKFIKSF

SEQ ID NO: 168898 - protein, 9 aa, Homo Sapiens
KVFERAVQY

SEQ ID NO: 168899 - protein, 9 aa, Homo Sapiens
KVMERLIEF

SEQ ID NO: 168900 - protein, 9 aa, Homo Sapiens
KVTELLRTF

SEQ ID NO: 168901 - protein, 9 aa, Homo Sapiens
KVYERAVEF

SEQ ID NO: 168902 - protein, 9 aa, Homo Sapiens
KWLLRLEEY

SEQ ID NO: 168903 - protein, 9 aa, Homo Sapiens
KYFLRGYRY

SEQ ID NO: 168904 - protein, 9 aa, Homo Sapiens
LAAAMVRVL

SEQ ID NO: 168905 - protein, 9 aa, Homo Sapiens
LAAARLAAA

SEQ ID NO: 168906 - protein, 9 aa, Homo Sapiens
LAAEFLKQV

SEQ ID NO: 168907 - protein, 9 aa, Homo Sapiens
LAAEVHRVL

SEQ ID NO: 168908 - protein, 9 aa, Homo Sapiens
LAAGKPRVL

SEQ ID NO: 168909 - protein, 9 aa, Homo Sapiens
LAAIWFRTY

SEQ ID NO: 168910 - protein, 9 aa, Homo Sapiens
LAALAKAPF

SEQ ID NO: 168911 - protein, 9 aa, Homo Sapiens
LAALPRPQL

SEQ ID NO: 168912 - protein, 9 aa, Homo Sapiens
LAALRLQSL

SEQ ID NO: 168913 - protein, 9 aa, Homo Sapiens
LAAPSRFVL

SEQ ID NO: 168914 - protein, 9 aa, Homo Sapiens
LAASALPAL

SEQ ID NO: 168915 - protein, 9 aa, Homo Sapiens
LAAVKAIAW

SEQ ID NO: 168916 - protein, 9 aa, Homo Sapiens
LAAYHPWVV

SEQ ID NO: 168917 - protein, 9 aa, Homo Sapiens
LAFDQQPAM

SEQ ID NO: 168918 - protein, 9 aa, Homo Sapiens
LAFERGYEF

SEQ ID NO: 168919 - protein, 9 aa, Homo Sapiens
LAFLRFVVY

SEQ ID NO: 168920 - protein, 9 aa, Homo Sapiens
LAFLRGLSY

SEQ ID NO: 168921 - protein, 9 aa, Homo Sapiens
LAFLRHLTL

SEQ ID NO: 168922 - protein, 9 aa, Homo Sapiens
LAFVKNDSY

SEQ ID NO: 168923 - protein, 9 aa, Homo Sapiens
LAGPLRPAA

SEQ ID NO: 168924 - protein, 9 aa, Homo Sapiens
LAIDAIHQL

SEQ ID NO: 168925 - protein, 9 aa, Homo Sapiens
LAIEHVRFF

SEQ ID NO: 168926 - protein, 9 aa, Homo Sapiens
LAIPITNTY

SEQ ID NO: 168927 - protein, 9 aa, Homo Sapiens
LAIPVFLTL

SEQ ID NO: 168928 - protein, 9 aa, Homo Sapiens
LAITCSFPL

SEQ ID NO: 168929 - protein, 9 aa, Homo Sapiens
LAKDGVLTL

SEQ ID NO: 168930 - protein, 9 aa, Homo Sapiens
LAKNFFNEL

SEQ ID NO: 168931 - protein, 9 aa, Homo Sapiens
LAKPPVVSV

SEQ ID NO: 168932 - protein, 9 aa, Homo Sapiens
LALAIAQEL

SEQ ID NO: 168933 - protein, 9 aa, Homo Sapiens
LALARLETY

SEQ ID NO: 168934 - protein, 9 aa, Homo Sapiens
LALEPGVAY

SEQ ID NO: 168935 - protein, 9 aa, Homo Sapiens
LALLNNVSY

SEQ ID NO: 168936 - protein, 9 aa, Homo Sapiens
LALLRELSL

SEQ ID NO: 168937 - protein, 9 aa, Homo Sapiens
LAMEPTPEL

SEQ ID NO: 168938 - protein, 9 aa, Homo Sapiens
LAMINRFQF

SEQ ID NO: 168939 - protein, 9 aa, Homo Sapiens
LANERLMTL

SEQ ID NO: 168940 - protein, 9 aa, Homo Sapiens
LANGEVRIY

SEQ ID NO: 168941 - protein, 9 aa, Homo Sapiens
LANGSILVY

SEQ ID NO: 168942 - protein, 9 aa, Homo Sapiens
LAPLTYISL

SEQ ID NO: 168943 - protein, 9 aa, Homo Sapiens
LAQDIFKEL

SEQ ID NO: 168944 - protein, 9 aa, Homo Sapiens
LAQEIVKAL

SEQ ID NO: 168945 - protein, 9 aa, Homo Sapiens
LAQIRQQQY

SEQ ID NO: 168946 - protein, 9 aa, Homo Sapiens
LAQQYYLVY

SEQ ID NO: 168947 - protein, 9 aa, Homo Sapiens
LAQTTRTAY

SEQ ID NO: 168948 - protein, 9 aa, Homo Sapiens
LARFNAREF

SEQ ID NO: 168949 - protein, 9 aa, Homo Sapiens
LARIYSFQM

SEQ ID NO: 168950 - protein, 9 aa, Homo Sapiens
LARIYSYQM

SEQ ID NO: 168951 - protein, 9 aa, Homo Sapiens
LARPLVLAL

SEQ ID NO: 168952 - protein, 9 aa, Homo Sapiens
LASAFFLVV

SEQ ID NO: 168953 - protein, 9 aa, Homo Sapiens
LASFKILAL

SEQ ID NO: 168954 - protein, 9 aa, Homo Sapiens
LASFREMVY

SEQ ID NO: 168955 - protein, 9 aa, Homo Sapiens
LASGKYRTF

SEQ ID NO: 168956 - protein, 9 aa, Homo Sapiens
LASHYIHIV

SEQ ID NO: 168957 - protein, 9 aa, Homo Sapiens
LASLKSLTY

SEQ ID NO: 168958 - protein, 9 aa, Homo Sapiens
LASLKTDTF

SEQ ID NO: 168959 - protein, 9 aa, Homo Sapiens
LASLSNRLY

SEQ ID NO: 168960 - protein, 9 aa, Homo Sapiens
LASNSIREA

SEQ ID NO: 168961 - protein, 9 aa, Homo Sapiens
LASPGHISV

SEQ ID NO: 168962 - protein, 9 aa, Homo Sapiens
LASPPWRVL

SEQ ID NO: 168963 - protein, 9 aa, Homo Sapiens
LASPVRAEM

SEQ ID NO: 168964 - protein, 9 aa, Homo Sapiens
LASSYERKL

SEQ ID NO: 168965 - protein, 9 aa, Homo Sapiens
LASYIHYVF

SEQ ID NO: 168966 - protein, 9 aa, Homo Sapiens
LASYVHYVF

SEQ ID NO: 168967 - protein, 9 aa, Homo Sapiens
LATAAALTY

SEQ ID NO: 168968 - protein, 9 aa, Homo Sapiens
LATAVVQLY

SEQ ID NO: 168969 - protein, 9 aa, Homo Sapiens
LATAYIHRF

SEQ ID NO: 168970 - protein, 9 aa, Homo Sapiens
LATDFIQSL

SEQ ID NO: 168971 - protein, 9 aa, Homo Sapiens
LATETVRSI

SEQ ID NO: 168972 - protein, 9 aa, Homo Sapiens
LATIRLLDV

SEQ ID NO: 168973 - protein, 9 aa, Homo Sapiens
LATKILHLL

SEQ ID NO: 168974 - protein, 9 aa, Homo Sapiens
LATLRNYDY

SEQ ID NO: 168975 - protein, 9 aa, Homo Sapiens
LATNFLLEM

SEQ ID NO: 168976 - protein, 9 aa, Homo Sapiens
LATPLHHTW

SEQ ID NO: 168977 - protein, 9 aa, Homo Sapiens
LATQMVRMI

SEQ ID NO: 168978 - protein, 9 aa, Homo Sapiens
LATRILHLL

SEQ ID NO: 168979 - protein, 9 aa, Homo Sapiens
LATSLPRLM

SEQ ID NO: 168980 - protein, 9 aa, Homo Sapiens
LATTVRPVF

SEQ ID NO: 168981 - protein, 9 aa, Homo Sapiens
LATWATKEL

SEQ ID NO: 168982 - protein, 9 aa, Homo Sapiens
LAVALNRSY

SEQ ID NO: 168983 - protein, 9 aa, Homo Sapiens
LAVDRLSLA

SEQ ID NO: 168984 - protein, 9 aa, Homo Sapiens
LAVGLSRIF

SEQ ID NO: 168985 - protein, 9 aa, Homo Sapiens
LAVLKLYQF

SEQ ID NO: 168986 - protein, 9 aa, Homo Sapiens
LAVLRLDSL

SEQ ID NO: 168987 - protein, 9 aa, Homo Sapiens
LAVNLTRVL

SEQ ID NO: 168988 - protein, 9 aa, Homo Sapiens
LAVSLVKVF

SEQ ID NO: 168989 - protein, 9 aa, Homo Sapiens
LAYLRLNTL

SEQ ID NO: 168990 - protein, 9 aa, Homo Sapiens
LAYLRTECY

SEQ ID NO: 168991 - protein, 9 aa, Homo Sapiens
LAYTLARVY

SEQ ID NO: 168992 - protein, 9 aa, Homo Sapiens
LFASTILHL

SEQ ID NO: 168993 - protein, 9 aa, Homo Sapiens
LFDERKYPY

SEQ ID NO: 168994 - protein, 9 aa, Homo Sapiens
LFLPGRMAY

SEQ ID NO: 168995 - protein, 9 aa, Homo Sapiens
LFMPRSTEF

SEQ ID NO: 168996 - protein, 9 aa, Homo Sapiens
LFSERIDVF

SEQ ID NO: 168997 - protein, 9 aa, Homo Sapiens
LFYERFRAY

SEQ ID NO: 168998 - protein, 9 aa, Homo Sapiens
LFYQRQDTF

SEQ ID NO: 168999 - protein, 9 aa, Homo Sapiens
LGALRELGF

SEQ ID NO: 169000 - protein, 9 aa, Homo Sapiens
LGAPAKPPL

SEQ ID NO: 169001 - protein, 9 aa, Homo Sapiens
LHYPIDSLT

SEQ ID NO: 169002 - protein, 9 aa, Homo Sapiens
LIAPPRYVM

SEQ ID NO: 169003 - protein, 9 aa, Homo Sapiens
LIKSYFLIV

SEQ ID NO: 169004 - protein, 9 aa, Homo Sapiens
LIVEPSREL

SEQ ID NO: 169005 - protein, 9 aa, Homo Sapiens
LLAARLVTF

SEQ ID NO: 169006 - protein, 9 aa, Homo Sapiens
LLETALTRV

SEQ ID NO: 169007 - protein, 9 aa, Homo Sapiens
LLHERIVQY

SEQ ID NO: 169008 - protein, 9 aa, Homo Sapiens
LLLLRGYAF

SEQ ID NO: 169009 - protein, 9 aa, Homo Sapiens
LLPPPMKEL

SEQ ID NO: 169010 - protein, 9 aa, Homo Sapiens
LLSDYIRLI

SEQ ID NO: 169011 - protein, 9 aa, Homo Sapiens
LLSLRILSF

SEQ ID NO: 169012 - protein, 9 aa, Homo Sapiens
LMAKPRPPL

SEQ ID NO: 169013 - protein, 9 aa, Homo Sapiens
LMSPVKPFY

SEQ ID NO: 169014 - protein, 9 aa, Homo Sapiens
LNSPYAKLY

SEQ ID NO: 169015 - protein, 9 aa, Homo Sapiens
LNTPENREY

SEQ ID NO: 169016 - protein, 9 aa, Homo Sapiens
LPINGNGKQ

SEQ ID NO: 169017 - protein, 9 aa, Homo Sapiens
LQAMPRTEF

SEQ ID NO: 169018 - protein, 9 aa, Homo Sapiens
LQGYLRSVF

SEQ ID NO: 169019 - protein, 9 aa, Homo Sapiens
LQIGVIRVY

SEQ ID NO: 169020 - protein, 9 aa, Homo Sapiens
LQQTRDLAF

SEQ ID NO: 169021 - protein, 9 aa, Homo Sapiens
LQSEVIRHY

SEQ ID NO: 169022 - protein, 9 aa, Homo Sapiens
LQSQWLRAY

SEQ ID NO: 169023 - protein, 9 aa, Homo Sapiens
LSADPRSVY

SEQ ID NO: 169024 - protein, 9 aa, Homo Sapiens
LSAEVYRIL

SEQ ID NO: 169025 - protein, 9 aa, Homo Sapiens
LSAGATRVY

SEQ ID NO: 169026 - protein, 9 aa, Homo Sapiens
LSALEEYTK

SEQ ID NO: 169027 - protein, 9 aa, Homo Sapiens
LSAMKEFAY

SEQ ID NO: 169028 - protein, 9 aa, Homo Sapiens
LSAPLHPEF

SEQ ID NO: 169029 - protein, 9 aa, Homo Sapiens
LSAVGERVF

SEQ ID NO: 169030 - protein, 9 aa, Homo Sapiens
LSEVTFRPL

SEQ ID NO: 169031 - protein, 9 aa, Homo Sapiens
LSFFMARVF

SEQ ID NO: 169032 - protein, 9 aa, Homo Sapiens
LSFIRSTEL

SEQ ID NO: 169033 - protein, 9 aa, Homo Sapiens
LSFPTTKTY

SEQ ID NO: 169034 - protein, 9 aa, Homo Sapiens
LSFQEVREY

SEQ ID NO: 169035 - protein, 9 aa, Homo Sapiens
LSFVRAFEF

SEQ ID NO: 169036 - protein, 9 aa, Homo Sapiens
LSIPYRLIF

SEQ ID NO: 169037 - protein, 9 aa, Homo Sapiens
LSIQRLWYF

SEQ ID NO: 169038 - protein, 9 aa, Homo Sapiens
LSKDSILSL

SEQ ID NO: 169039 - protein, 9 aa, Homo Sapiens
LSKDYTLIV

SEQ ID NO: 169040 - protein, 9 aa, Homo Sapiens
LSKFYELEL

SEQ ID NO: 169041 - protein, 9 aa, Homo Sapiens
LSKGPGLEV

SEQ ID NO: 169042 - protein, 9 aa, Homo Sapiens
LSLFRDEVF

SEQ ID NO: 169043 - protein, 9 aa, Homo Sapiens
LSLHNDHPY

SEQ ID NO: 169044 - protein, 9 aa, Homo Sapiens
LSLVSKTEI

SEQ ID NO: 169045 - protein, 9 aa, Homo Sapiens
LSMERMVPA

SEQ ID NO: 169046 - protein, 9 aa, Homo Sapiens
LSMTRPVSI

SEQ ID NO: 169047 - protein, 9 aa, Homo Sapiens
LSQERIIQF

SEQ ID NO: 169048 - protein, 9 aa, Homo Sapiens
LSQIRIDAL

SEQ ID NO: 169049 - protein, 9 aa, Homo Sapiens
LSQNRVAEF

SEQ ID NO: 169050 - protein, 9 aa, Homo Sapiens
LSQVRFLVL

SEQ ID NO: 169051 - protein, 9 aa, Homo Sapiens
LSQYRDQHF

SEQ ID NO: 169052 - protein, 9 aa, Homo Sapiens
LSRPNIFIL

SEQ ID NO: 169053 - protein, 9 aa, Homo Sapiens
LSSFKVAQY

SEQ ID NO: 169054 - protein, 9 aa, Homo Sapiens
LSSLRSVSL

SEQ ID NO: 169055 - protein, 9 aa, Homo Sapiens
LSSPWYHTY

SEQ ID NO: 169056 - protein, 9 aa, Homo Sapiens
LSSSVIREL

SEQ ID NO: 169057 - protein, 9 aa, Homo Sapiens
LSTALSLLY

SEQ ID NO: 169058 - protein, 9 aa, Homo Sapiens
LSTEAARVL

SEQ ID NO: 169059 - protein, 9 aa, Homo Sapiens
LSTEALRLW

SEQ ID NO: 169060 - protein, 9 aa, Homo Sapiens
LSTFRKHSL

SEQ ID NO: 169061 - protein, 9 aa, Homo Sapiens
LSTIQKIAL

SEQ ID NO: 169062 - protein, 9 aa, Homo Sapiens
LSTIREVAV

SEQ ID NO: 169063 - protein, 9 aa, Homo Sapiens
LSTLVRPVF

SEQ ID NO: 169064 - protein, 9 aa, Homo Sapiens
LSTMFRVEY

SEQ ID NO: 169065 - protein, 9 aa, Homo Sapiens
LSTPLIRTF

SEQ ID NO: 169066 - protein, 9 aa, Homo Sapiens
LSTPYIHSL

SEQ ID NO: 169067 - protein, 9 aa, Homo Sapiens
LSTTKPFEY

SEQ ID NO: 169068 - protein, 9 aa, Homo Sapiens
LSTTVKREL

SEQ ID NO: 169069 - protein, 9 aa, Homo Sapiens
LSVIQLWHY

SEQ ID NO: 169070 - protein, 9 aa, Homo Sapiens
LSYLRESSL

SEQ ID NO: 169071 - protein, 9 aa, Homo Sapiens
LTADFLREY

SEQ ID NO: 169072 - protein, 9 aa, Homo Sapiens
LTAKVFRTY

SEQ ID NO: 169073 - protein, 9 aa, Homo Sapiens
LTIFTARLY

SEQ ID NO: 169074 - protein, 9 aa, Homo Sapiens
LTLLRFLEY

SEQ ID NO: 169075 - protein, 9 aa, Homo Sapiens
LTRGYFLEH

SEQ ID NO: 169076 - protein, 9 aa, Homo Sapiens
LTTDISLIF

SEQ ID NO: 169077 - protein, 9 aa, Homo Sapiens
LTTEVHPEL

SEQ ID NO: 169078 - protein, 9 aa, Homo Sapiens
LTTLRVWCY

SEQ ID NO: 169079 - protein, 9 aa, Homo Sapiens
LTVLVPRVW

SEQ ID NO: 169080 - protein, 9 aa, Homo Sapiens
LTVQVARVY

SEQ ID NO: 169081 - protein, 9 aa, Homo Sapiens
LVAASQAAL

SEQ ID NO: 169082 - protein, 9 aa, Homo Sapiens
LVEPEGIEK

SEQ ID NO: 169083 - protein, 9 aa, Homo Sapiens
LVPPWTRVY

SEQ ID NO: 169084 - protein, 9 aa, Homo Sapiens
LVRPEVDVM

SEQ ID NO: 169085 - protein, 9 aa, Homo Sapiens
LVTGFARIF

SEQ ID NO: 169086 - protein, 9 aa, Homo Sapiens
LVTGTVRTF

SEQ ID NO: 169087 - protein, 9 aa, Homo Sapiens
MAADGRLVF

SEQ ID NO: 169088 - protein, 9 aa, Homo Sapiens
MAAGLARLL

SEQ ID NO: 169089 - protein, 9 aa, Homo Sapiens
MAALRTQTL

SEQ ID NO: 169090 - protein, 9 aa, Homo Sapiens
MAAMPQTVY

SEQ ID NO: 169091 - protein, 9 aa, Homo Sapiens
MAAYYEHRL

SEQ ID NO: 169092 - protein, 9 aa, Homo Sapiens
MAFNRAASF

SEQ ID NO: 169093 - protein, 9 aa, Homo Sapiens
MAFYVVKMY

SEQ ID NO: 169094 - protein, 9 aa, Homo Sapiens
MAGPLRAPL

SEQ ID NO: 169095 - protein, 9 aa, Homo Sapiens
MAISGVPVL

SEQ ID NO: 169096 - protein, 9 aa, Homo Sapiens
MAIVGGMAL

SEQ ID NO: 169097 - protein, 9 aa, Homo Sapiens
MAKMRLLTF

SEQ ID NO: 169098 - protein, 9 aa, Homo Sapiens
MAKRFAYPL

SEQ ID NO: 169099 - protein, 9 aa, Homo Sapiens
MALLFLLPL

SEQ ID NO: 169100 - protein, 9 aa, Homo Sapiens
MALVRFVNL

SEQ ID NO: 169101 - protein, 9 aa, Homo Sapiens
MANIPLPEY

SEQ ID NO: 169102 - protein, 9 aa, Homo Sapiens
MANPTALLL

SEQ ID NO: 169103 - protein, 9 aa, Homo Sapiens
MANWQLIHM

SEQ ID NO: 169104 - protein, 9 aa, Homo Sapiens
MAPLKMLAL

SEQ ID NO: 169105 - protein, 9 aa, Homo Sapiens
MAQLKCYYF

SEQ ID NO: 169106 - protein, 9 aa, Homo Sapiens
MAQRLVRVL

SEQ ID NO: 169107 - protein, 9 aa, Homo Sapiens
MARANARLF

SEQ ID NO: 169108 - protein, 9 aa, Homo Sapiens
MARGAALAL

SEQ ID NO: 169109 - protein, 9 aa, Homo Sapiens
MASGLVRLL

SEQ ID NO: 169110 - protein, 9 aa, Homo Sapiens
MASIRLQGL

SEQ ID NO: 169111 - protein, 9 aa, Homo Sapiens
MASKILKSY

SEQ ID NO: 169112 - protein, 9 aa, Homo Sapiens
MASLRSLSL

SEQ ID NO: 169113 - protein, 9 aa, Homo Sapiens
MATGDERFY

SEQ ID NO: 169114 - protein, 9 aa, Homo Sapiens
MATLLRTSF

SEQ ID NO: 169115 - protein, 9 aa, Homo Sapiens
MATNTVYVF

SEQ ID NO: 169116 - protein, 9 aa, Homo Sapiens
MATPYMNHY

SEQ ID NO: 169117 - protein, 9 aa, Homo Sapiens
MATVVYKVF

SEQ ID NO: 169118 - protein, 9 aa, Homo Sapiens
MAVEFLHEL

SEQ ID NO: 169119 - protein, 9 aa, Homo Sapiens
MAVERCLAL

SEQ ID NO: 169120 - protein, 9 aa, Homo Sapiens
MAVKQGRFY

SEQ ID NO: 169121 - protein, 9 aa, Homo Sapiens
MAVLLGKVY

SEQ ID NO: 169122 - protein, 9 aa, Homo Sapiens
MAYLKIQKY

SEQ ID NO: 169123 - protein, 9 aa, Homo Sapiens
MFLIRDWSY

SEQ ID NO: 169124 - protein, 9 aa, Homo Sapiens
MFLVRDWSF

SEQ ID NO: 169125 - protein, 9 aa, Homo Sapiens
MGYIRNVAY

SEQ ID NO: 169126 - protein, 9 aa, Homo Sapiens
MIRAAPPPL

SEQ ID NO: 169127 - protein, 9 aa, Homo Sapiens
MISEPRISY

SEQ ID NO: 169128 - protein, 9 aa, Homo Sapiens
MLAPPRELF

SEQ ID NO: 169129 - protein, 9 aa, Homo Sapiens
MMSEVIRIL

SEQ ID NO: 169130 - protein, 9 aa, Homo Sapiens
MNSLRKSNT

SEQ ID NO: 169131 - protein, 9 aa, Homo Sapiens
MNVVRNLTY

SEQ ID NO: 169132 - protein, 9 aa, Homo Sapiens
MQAPGRGPL

SEQ ID NO: 169133 - protein, 9 aa, Homo Sapiens
MQIAWSREF

SEQ ID NO: 169134 - protein, 9 aa, Homo Sapiens
MQTVYLREI

SEQ ID NO: 169135 - protein, 9 aa, Homo Sapiens
MSADRVVAF

SEQ ID NO: 169136 - protein, 9 aa, Homo Sapiens
MSAGPRYEY

SEQ ID NO: 169137 - protein, 9 aa, Homo Sapiens
MSIPFRSAY

SEQ ID NO: 169138 - protein, 9 aa, Homo Sapiens
MSLPYRLVF

SEQ ID NO: 169139 - protein, 9 aa, Homo Sapiens
MSRSVALAV

SEQ ID NO: 169140 - protein, 9 aa, Homo Sapiens
MSSLRPLAI

SEQ ID NO: 169141 - protein, 9 aa, Homo Sapiens
MSSPLSKEL

SEQ ID NO: 169142 - protein, 9 aa, Homo Sapiens
MSSSVVRRL

SEQ ID NO: 169143 - protein, 9 aa, Homo Sapiens
MSVEVRQTL

SEQ ID NO: 169144 - protein, 9 aa, Homo Sapiens
MTALQNTAL

SEQ ID NO: 169145 - protein, 9 aa, Homo Sapiens
MTAPLKLTY

SEQ ID NO: 169146 - protein, 9 aa, Homo Sapiens
MTAVRAWEF

SEQ ID NO: 169147 - protein, 9 aa, Homo Sapiens
MTFPGERIY

SEQ ID NO: 169148 - protein, 9 aa, Homo Sapiens
MTIEPFISL

SEQ ID NO: 169149 - protein, 9 aa, Homo Sapiens
MTMEYKQEL

SEQ ID NO: 169150 - protein, 9 aa, Homo Sapiens
MTQLRIIFY

SEQ ID NO: 169151 - protein, 9 aa, Homo Sapiens
MTQQPRPVL

SEQ ID NO: 169152 - protein, 9 aa, Homo Sapiens
MTSSRLWFS

SEQ ID NO: 169153 - protein, 9 aa, Homo Sapiens
MTTAFIHAL

SEQ ID NO: 169154 - protein, 9 aa, Homo Sapiens
MTTEILRSM

SEQ ID NO: 169155 - protein, 9 aa, Homo Sapiens
MVSAIVRTM

SEQ ID NO: 169156 - protein, 9 aa, Homo Sapiens
MWLPVVRTW

SEQ ID NO: 169157 - protein, 9 aa, Homo Sapiens
NAAERRGPL

SEQ ID NO: 169158 - protein, 9 aa, Homo Sapiens
NAFTMPLHM

SEQ ID NO: 169159 - protein, 9 aa, Homo Sapiens
NAIWRAWYM

SEQ ID NO: 169160 - protein, 9 aa, Homo Sapiens
NAKAALLEL

SEQ ID NO: 169161 - protein, 9 aa, Homo Sapiens
NAKDFFRVL

SEQ ID NO: 169162 - protein, 9 aa, Homo Sapiens
NAKGYTIPL

SEQ ID NO: 169163 - protein, 9 aa, Homo Sapiens
NAKKILLEM

SEQ ID NO: 169164 - protein, 9 aa, Homo Sapiens
NALGHVRYV

SEQ ID NO: 169165 - protein, 9 aa, Homo Sapiens
NALGVILQV

SEQ ID NO: 169166 - protein, 9 aa, Homo Sapiens
NALLRPRTF

SEQ ID NO: 169167 - protein, 9 aa, Homo Sapiens
NALVHLIEI

SEQ ID NO: 169168 - protein, 9 aa, Homo Sapiens
NALVHLIEV

SEQ ID NO: 169169 - protein, 9 aa, Homo Sapiens
NAMDVVVQF

SEQ ID NO: 169170 - protein, 9 aa, Homo Sapiens
NAMGFHVIL

SEQ ID NO: 169171 - protein, 9 aa, Homo Sapiens
NAMGYVRMI

SEQ ID NO: 169172 - protein, 9 aa, Homo Sapiens
NAMPHIKTY

SEQ ID NO: 169173 - protein, 9 aa, Homo Sapiens
NANEMFRIF

SEQ ID NO: 169174 - protein, 9 aa, Homo Sapiens
NANLLEICY

SEQ ID NO: 169175 - protein, 9 aa, Homo Sapiens
NAQLRNINF

SEQ ID NO: 169176 - protein, 9 aa, Homo Sapiens
NASFPKVFI

SEQ ID NO: 169177 - protein, 9 aa, Homo Sapiens
NASPINRIV

SEQ ID NO: 169178 - protein, 9 aa, Homo Sapiens
NASVFGRVM

SEQ ID NO: 169179 - protein, 9 aa, Homo Sapiens
NATAFFRQH

SEQ ID NO: 169180 - protein, 9 aa, Homo Sapiens
NATAVVRHM

SEQ ID NO: 169181 - protein, 9 aa, Homo Sapiens
NATDLLRKM

SEQ ID NO: 169182 - protein, 9 aa, Homo Sapiens
NATEWVREH

SEQ ID NO: 169183 - protein, 9 aa, Homo Sapiens
NATFRILEV

SEQ ID NO: 169184 - protein, 9 aa, Homo Sapiens
NATGPRPAL

SEQ ID NO: 169185 - protein, 9 aa, Homo Sapiens
NATIMVVSV

SEQ ID NO: 169186 - protein, 9 aa, Homo Sapiens
NATIRVTNL

SEQ ID NO: 169187 - protein, 9 aa, Homo Sapiens
NATKARIPF

SEQ ID NO: 169188 - protein, 9 aa, Homo Sapiens
NATKLERVF

SEQ ID NO: 169189 - protein, 9 aa, Homo Sapiens
NATKTFREF

SEQ ID NO: 169190 - protein, 9 aa, Homo Sapiens
NATLWYKIF

SEQ ID NO: 169191 - protein, 9 aa, Homo Sapiens
NATPLTIER

SEQ ID NO: 169192 - protein, 9 aa, Homo Sapiens
NATQFIKQL

SEQ ID NO: 169193 - protein, 9 aa, Homo Sapiens
NATSLQHLL

SEQ ID NO: 169194 - protein, 9 aa, Homo Sapiens
NATSRILDM

SEQ ID NO: 169195 - protein, 9 aa, Homo Sapiens
NATVKGVNF

SEQ ID NO: 169196 - protein, 9 aa, Homo Sapiens
NAVEGLRTL

SEQ ID NO: 169197 - protein, 9 aa, Homo Sapiens
NAWHRVHVY

SEQ ID NO: 169198 - protein, 9 aa, Homo Sapiens
NFGLRTDMY

SEQ ID NO: 169199 - protein, 9 aa, Homo Sapiens
NFHWRDWTY

SEQ ID NO: 169200 - protein, 9 aa, Homo Sapiens
NFTPNLRVW

SEQ ID NO: 169201 - protein, 9 aa, Homo Sapiens
NGTYRLLEF

SEQ ID NO: 169202 - protein, 9 aa, Homo Sapiens
NIFSEVRVY

SEQ ID NO: 169203 - protein, 9 aa, Homo Sapiens
NIRLRLEEY

SEQ ID NO: 169204 - protein, 9 aa, Homo Sapiens
NIYIRRYVF

SEQ ID NO: 169205 - protein, 9 aa, Homo Sapiens
NLSIRIAAY

SEQ ID NO: 169206 - protein, 9 aa, Homo Sapiens
NLSQRVVSY

SEQ ID NO: 169207 - protein, 9 aa, Homo Sapiens
NMAEFRPEM

SEQ ID NO: 169208 - protein, 9 aa, Homo Sapiens
NMASRPLTF

SEQ ID NO: 169209 - protein, 9 aa, Homo Sapiens
NMTVRFFSF

SEQ ID NO: 169210 - protein, 9 aa, Homo Sapiens
NQTEFERVF

SEQ ID NO: 169211 - protein, 9 aa, Homo Sapiens
NRKMTYIAL

SEQ ID NO: 169212 - protein, 9 aa, Homo Sapiens
NSALRQMSY

SEQ ID NO: 169213 - protein, 9 aa, Homo Sapiens
NSANRLFQY

SEQ ID NO: 169214 - protein, 9 aa, Homo Sapiens
NSAVRTCGF

SEQ ID NO: 169215 - protein, 9 aa, Homo Sapiens
NSILRKQAF

SEQ ID NO: 169216 - protein, 9 aa, Homo Sapiens
NSLINPFIY

SEQ ID NO: 169217 - protein, 9 aa, Homo Sapiens
NSLLRENSF

SEQ ID NO: 169218 - protein, 9 aa, Homo Sapiens
NSSEKLQFY

SEQ ID NO: 169219 - protein, 9 aa, Homo Sapiens
NSTNKLFQY

SEQ ID NO: 169220 - protein, 9 aa, Homo Sapiens
NSTPWVKEV

SEQ ID NO: 169221 - protein, 9 aa, Homo Sapiens
NSTVRLYEW

SEQ ID NO: 169222 - protein, 9 aa, Homo Sapiens
NSTYIMRVL

SEQ ID NO: 169223 - protein, 9 aa, Homo Sapiens
NSYLRDQWF

SEQ ID NO: 169224 - protein, 9 aa, Homo Sapiens
NTIDPSHPM

SEQ ID NO: 169225 - protein, 9 aa, Homo Sapiens
NTLFRFWSF

SEQ ID NO: 169226 - protein, 9 aa, Homo Sapiens
NTSLPRPAL

SEQ ID NO: 169227 - protein, 9 aa, Homo Sapiens
NVRPVPLEL

SEQ ID NO: 169228 - protein, 9 aa, Homo Sapiens
PARLAVPAV

SEQ ID NO: 169229 - protein, 9 aa, Homo Sapiens
PASLRDVAY

SEQ ID NO: 169230 - protein, 9 aa, Homo Sapiens
PSVNYSKVY

SEQ ID NO: 169231 - protein, 9 aa, Homo Sapiens
QAAARLLVF

SEQ ID NO: 169232 - protein, 9 aa, Homo Sapiens
QAAAVRHVL

SEQ ID NO: 169233 - protein, 9 aa, Homo Sapiens
QAAMRLYVM

SEQ ID NO: 169234 - protein, 9 aa, Homo Sapiens
QAAPVKWIF

SEQ ID NO: 169235 - protein, 9 aa, Homo Sapiens
QAIENAHVL

SEQ ID NO: 169236 - protein, 9 aa, Homo Sapiens
QAIETARAW

SEQ ID NO: 169237 - protein, 9 aa, Homo Sapiens
QAIGAIRTL

SEQ ID NO: 169238 - protein, 9 aa, Homo Sapiens
QAITRVIPL

SEQ ID NO: 169239 - protein, 9 aa, Homo Sapiens
QALDYFLKM

SEQ ID NO: 169240 - protein, 9 aa, Homo Sapiens
QALPQVRLY

SEQ ID NO: 169241 - protein, 9 aa, Homo Sapiens
QALPWVRYI

SEQ ID NO: 169242 - protein, 9 aa, Homo Sapiens
QAMPPLFSL

SEQ ID NO: 169243 - protein, 9 aa, Homo Sapiens
QANIRLTSL

SEQ ID NO: 169244 - protein, 9 aa, Homo Sapiens
QANTIFHLF

SEQ ID NO: 169245 - protein, 9 aa, Homo Sapiens
QAQTDRVSL

SEQ ID NO: 169246 - protein, 9 aa, Homo Sapiens
QAREYVLEM

SEQ ID NO: 169247 - protein, 9 aa, Homo Sapiens
QASLKLFEM

SEQ ID NO: 169248 - protein, 9 aa, Homo Sapiens
QASWYIHKY

SEQ ID NO: 169249 - protein, 9 aa, Homo Sapiens
QATELVHQL

SEQ ID NO: 169250 - protein, 9 aa, Homo Sapiens
QATIYVHKV

SEQ ID NO: 169251 - protein, 9 aa, Homo Sapiens
QATPLLHAL

SEQ ID NO: 169252 - protein, 9 aa, Homo Sapiens
QATTAYFLY

SEQ ID NO: 169253 - protein, 9 aa, Homo Sapiens
QATTLNVAF

SEQ ID NO: 169254 - protein, 9 aa, Homo Sapiens
QATTLVHQI

SEQ ID NO: 169255 - protein, 9 aa, Homo Sapiens
QAVQVRPSL

SEQ ID NO: 169256 - protein, 9 aa, Homo Sapiens
QCSLKSVAF

SEQ ID NO: 169257 - protein, 9 aa, Homo Sapiens
QCTQVRVEF

SEQ ID NO: 169258 - protein, 9 aa, Homo Sapiens
QFALRLLAF

SEQ ID NO: 169259 - protein, 9 aa, Homo Sapiens
QIPEIKQTL

SEQ ID NO: 169260 - protein, 9 aa, Homo Sapiens
QLMLRVNEY

SEQ ID NO: 169261 - protein, 9 aa, Homo Sapiens
QLSLRTVSL

SEQ ID NO: 169262 - protein, 9 aa, Homo Sapiens
QNMERIFSF

SEQ ID NO: 169263 - protein, 9 aa, Homo Sapiens
QNVARRIEF

SEQ ID NO: 169264 - protein, 9 aa, Homo Sapiens
QQSPVRPSF

SEQ ID NO: 169265 - protein, 9 aa, Homo Sapiens
QQTLRTVAF

SEQ ID NO: 169266 - protein, 9 aa, Homo Sapiens
QSRPFFNEL

SEQ ID NO: 169267 - protein, 9 aa, Homo Sapiens
QSSSWTRVF

SEQ ID NO: 169268 - protein, 9 aa, Homo Sapiens
QSTDIIRYL

SEQ ID NO: 169269 - protein, 9 aa, Homo Sapiens
QTAPLRAEL

SEQ ID NO: 169270 - protein, 9 aa, Homo Sapiens
QTLQRSWAY

SEQ ID NO: 169271 - protein, 9 aa, Homo Sapiens
QTRGWFYTL

SEQ ID NO: 169272 - protein, 9 aa, Homo Sapiens
QTSEFIRAL

SEQ ID NO: 169273 - protein, 9 aa, Homo Sapiens
QVTEAFREF

SEQ ID NO: 169274 - protein, 9 aa, Homo Sapiens
QWSLREVVF

SEQ ID NO: 169275 - protein, 9 aa, Homo Sapiens
RAAAFFLSL

SEQ ID NO: 169276 - protein, 9 aa, Homo Sapiens
RAAEGVRAW

SEQ ID NO: 169277 - protein, 9 aa, Homo Sapiens
RAAEMEHLL

SEQ ID NO: 169278 - protein, 9 aa, Homo Sapiens
RAAEPLLTL

SEQ ID NO: 169279 - protein, 9 aa, Homo Sapiens
RAALRLLTY

SEQ ID NO: 169280 - protein, 9 aa, Homo Sapiens
RAALRVYAV

SEQ ID NO: 169281 - protein, 9 aa, Homo Sapiens
RAAPFSLEY

SEQ ID NO: 169282 - protein, 9 aa, Homo Sapiens
RAAPHRISL

SEQ ID NO: 169283 - protein, 9 aa, Homo Sapiens
RAAQFLRKM

SEQ ID NO: 169284 - protein, 9 aa, Homo Sapiens
RAIDALREF

SEQ ID NO: 169285 - protein, 9 aa, Homo Sapiens
RAIDSIHQL

SEQ ID NO: 169286 - protein, 9 aa, Homo Sapiens
RAIIRENEF

SEQ ID NO: 169287 - protein, 9 aa, Homo Sapiens
RAILRIIYF

SEQ ID NO: 169288 - protein, 9 aa, Homo Sapiens
RAIQFYLEF

SEQ ID NO: 169289 - protein, 9 aa, Homo Sapiens
RAKELFHEL

SEQ ID NO: 169290 - protein, 9 aa, Homo Sapiens
RAKNWVKEL

SEQ ID NO: 169291 - protein, 9 aa, Homo Sapiens
RALDHYLTL

SEQ ID NO: 169292 - protein, 9 aa, Homo Sapiens
RALDYALQI

SEQ ID NO: 169293 - protein, 9 aa, Homo Sapiens
RANIQAVSL

SEQ ID NO: 169294 - protein, 9 aa, Homo Sapiens
RARARPPQF

SEQ ID NO: 169295 - protein, 9 aa, Homo Sapiens
RARDLFFAL

SEQ ID NO: 169296 - protein, 9 aa, Homo Sapiens
RAREVIEAL

SEQ ID NO: 169297 - protein, 9 aa, Homo Sapiens
RASFIFISV

SEQ ID NO: 169298 - protein, 9 aa, Homo Sapiens
RASLKTAIY

SEQ ID NO: 169299 - protein, 9 aa, Homo Sapiens
RASLLLKTY

SEQ ID NO: 169300 - protein, 9 aa, Homo Sapiens
RASPFLLQY

SEQ ID NO: 169301 - protein, 9 aa, Homo Sapiens
RASWIAQVF

SEQ ID NO: 169302 - protein, 9 aa, Homo Sapiens
RATDYVFRI

SEQ ID NO: 169303 - protein, 9 aa, Homo Sapiens
RATFYLNVL

SEQ ID NO: 169304 - protein, 9 aa, Homo Sapiens
RATHRLLLL

SEQ ID NO: 169305 - protein, 9 aa, Homo Sapiens
RATKLLKAL

SEQ ID NO: 169306 - protein, 9 aa, Homo Sapiens
RATVHVRLV

SEQ ID NO: 169307 - protein, 9 aa, Homo Sapiens
RATWKSNYF

SEQ ID NO: 169308 - protein, 9 aa, Homo Sapiens
RAVEPLRTF

SEQ ID NO: 169309 - protein, 9 aa, Homo Sapiens
RAWTRLYAM

SEQ ID NO: 169310 - protein, 9 aa, Homo Sapiens
RAYAKALHY

SEQ ID NO: 169311 - protein, 9 aa, Homo Sapiens
RAYPTVKFY

SEQ ID NO: 169312 - protein, 9 aa, Homo Sapiens
RCFHKMISY

SEQ ID NO: 169313 - protein, 9 aa, Homo Sapiens
RFTEWLHEV

SEQ ID NO: 169314 - protein, 9 aa, Homo Sapiens
RFYGRDYEY

SEQ ID NO: 169315 - protein, 9 aa, Homo Sapiens
RGFFRSVFY

SEQ ID NO: 169316 - protein, 9 aa, Homo Sapiens
RGKDYFLTI

SEQ ID NO: 169317 - protein, 9 aa, Homo Sapiens
RGTDFVRTL

SEQ ID NO: 169318 - protein, 9 aa, Homo Sapiens
RGTPWLRVH

SEQ ID NO: 169319 - protein, 9 aa, Homo Sapiens
RIAEFAFEY

SEQ ID NO: 169320 - protein, 9 aa, Homo Sapiens
RISGVDRYY

SEQ ID NO: 169321 - protein, 9 aa, Homo Sapiens
RITAVRRVY

SEQ ID NO: 169322 - protein, 9 aa, Homo Sapiens
RLALRTVYY

SEQ ID NO: 169323 - protein, 9 aa, Homo Sapiens
RLFPNLPEL

SEQ ID NO: 169324 - protein, 9 aa, Homo Sapiens
RLFSRLYTY

SEQ ID NO: 169325 - protein, 9 aa, Homo Sapiens
RLFVGARIY

SEQ ID NO: 169326 - protein, 9 aa, Homo Sapiens
RLHLRPVAF

SEQ ID NO: 169327 - protein, 9 aa, Homo Sapiens
RLTDLVKEY

SEQ ID NO: 169328 - protein, 9 aa, Homo Sapiens
RLTPIDRVF

SEQ ID NO: 169329 - protein, 9 aa, Homo Sapiens
RMSGMIRLY

SEQ ID NO: 169330 - protein, 9 aa, Homo Sapiens
RNFSRYIAY

SEQ ID NO: 169331 - protein, 9 aa, Homo Sapiens
RNYYRKIGY

SEQ ID NO: 169332 - protein, 9 aa, Homo Sapiens
RPSAFRLTW

SEQ ID NO: 169333 - protein, 9 aa, Homo Sapiens
RSALPRPSL

SEQ ID NO: 169334 - protein, 9 aa, Homo Sapiens
RSFLRGLPA

SEQ ID NO: 169335 - protein, 9 aa, Homo Sapiens
RSHPFIKEY

SEQ ID NO: 169336 - protein, 9 aa, Homo Sapiens
RSILREFAF

SEQ ID NO: 169337 - protein, 9 aa, Homo Sapiens
RSMEAHNIL

SEQ ID NO: 169338 - protein, 9 aa, Homo Sapiens
RSSEYLRAL

SEQ ID NO: 169339 - protein, 9 aa, Homo Sapiens
RSSPVEYEF

SEQ ID NO: 169340 - protein, 9 aa, Homo Sapiens
RSTDSIRLL

SEQ ID NO: 169341 - protein, 9 aa, Homo Sapiens
RTTFFHHEY

SEQ ID NO: 169342 - protein, 9 aa, Homo Sapiens
RTTNLIRHF

SEQ ID NO: 169343 - protein, 9 aa, Homo Sapiens
RVRESLPEL

SEQ ID NO: 169344 - protein, 9 aa, Homo Sapiens
RVTALLKVY

SEQ ID NO: 169345 - protein, 9 aa, Homo Sapiens
RVTNWNRKL

SEQ ID NO: 169346 - protein, 9 aa, Homo Sapiens
RWPDYVREL

SEQ ID NO: 169347 - protein, 9 aa, Homo Sapiens
SAAAAPHLL

SEQ ID NO: 169348 - protein, 9 aa, Homo Sapiens
SAAAFYYVF

SEQ ID NO: 169349 - protein, 9 aa, Homo Sapiens
SAAAIFKIY

SEQ ID NO: 169350 - protein, 9 aa, Homo Sapiens
SAAELRHVM

SEQ ID NO: 169351 - protein, 9 aa, Homo Sapiens
SAAENFLVL

SEQ ID NO: 169352 - protein, 9 aa, Homo Sapiens
SAAERPLEI

SEQ ID NO: 169353 - protein, 9 aa, Homo Sapiens
SAAFAVKLF

SEQ ID NO: 169354 - protein, 9 aa, Homo Sapiens
SAALPLPVL

SEQ ID NO: 169355 - protein, 9 aa, Homo Sapiens
SAANIQPIF

SEQ ID NO: 169356 - protein, 9 aa, Homo Sapiens
SAAPLPRLA

SEQ ID NO: 169357 - protein, 9 aa, Homo Sapiens
SAAPLQPVL

SEQ ID NO: 169358 - protein, 9 aa, Homo Sapiens
SAAPPLPSL

SEQ ID NO: 169359 - protein, 9 aa, Homo Sapiens
SAAPVAHLL

SEQ ID NO: 169360 - protein, 9 aa, Homo Sapiens
SAAQPGVAF

SEQ ID NO: 169361 - protein, 9 aa, Homo Sapiens
SAAQRLTAL

SEQ ID NO: 169362 - protein, 9 aa, Homo Sapiens
SAAYLPRMW

SEQ ID NO: 169363 - protein, 9 aa, Homo Sapiens
SAAYYLNDL

SEQ ID NO: 169364 - protein, 9 aa, Homo Sapiens
SAFDRKVQF

SEQ ID NO: 169365 - protein, 9 aa, Homo Sapiens
SAFINLVEF

SEQ ID NO: 169366 - protein, 9 aa, Homo Sapiens
SAFLKTIAL

SEQ ID NO: 169367 - protein, 9 aa, Homo Sapiens
SAFLPARFY

SEQ ID NO: 169368 - protein, 9 aa, Homo Sapiens
SAFPEVRSL

SEQ ID NO: 169369 - protein, 9 aa, Homo Sapiens
SAFPFPVTV

SEQ ID NO: 169370 - protein, 9 aa, Homo Sapiens
SAFPHLRVL

SEQ ID NO: 169371 - protein, 9 aa, Homo Sapiens
SAFYRKYEL

SEQ ID NO: 169372 - protein, 9 aa, Homo Sapiens
SAGLRLFAL

SEQ ID NO: 169373 - protein, 9 aa, Homo Sapiens
SAGLRVLAL

SEQ ID NO: 169374 - protein, 9 aa, Homo Sapiens
SAGPLLRPY

SEQ ID NO: 169375 - protein, 9 aa, Homo Sapiens
SAHSHFISL

SEQ ID NO: 169376 - protein, 9 aa, Homo Sapiens
SAIASTKVM

SEQ ID NO: 169377 - protein, 9 aa, Homo Sapiens
SAIAVFLVL

SEQ ID NO: 169378 - protein, 9 aa, Homo Sapiens
SAIDFYRKF

SEQ ID NO: 169379 - protein, 9 aa, Homo Sapiens
SAIDRIFTL

SEQ ID NO: 169380 - protein, 9 aa, Homo Sapiens
SAIGYIHSL

SEQ ID NO: 169381 - protein, 9 aa, Homo Sapiens
SAILDLPVL

SEQ ID NO: 169382 - protein, 9 aa, Homo Sapiens
SAIPHPLIM

SEQ ID NO: 169383 - protein, 9 aa, Homo Sapiens
SAIQNRFKY

SEQ ID NO: 169384 - protein, 9 aa, Homo Sapiens
SAISSVRLY

SEQ ID NO: 169385 - protein, 9 aa, Homo Sapiens
SAITRPFPF

SEQ ID NO: 169386 - protein, 9 aa, Homo Sapiens
SAIYRLFDY

SEQ ID NO: 169387 - protein, 9 aa, Homo Sapiens
SAKDFEVAM

SEQ ID NO: 169388 - protein, 9 aa, Homo Sapiens
SAKDYFFKA

SEQ ID NO: 169389 - protein, 9 aa, Homo Sapiens
SAKPYAHIL

SEQ ID NO: 169390 - protein, 9 aa, Homo Sapiens
SAKTPGFSV

SEQ ID NO: 169391 - protein, 9 aa, Homo Sapiens
SAKWPLPSC

SEQ ID NO: 169392 - protein, 9 aa, Homo Sapiens
SALDMTRYW

SEQ ID NO: 169393 - protein, 9 aa, Homo Sapiens
SALEVPRLY

SEQ ID NO: 169394 - protein, 9 aa, Homo Sapiens
SALEVVRKY

SEQ ID NO: 169395 - protein, 9 aa, Homo Sapiens
SALFLGVAY

SEQ ID NO: 169396 - protein, 9 aa, Homo Sapiens
SALTRLASF

SEQ ID NO: 169397 - protein, 9 aa, Homo Sapiens
SAMEVVPAL

SEQ ID NO: 169398 - protein, 9 aa, Homo Sapiens
SAMMYIQEL

SEQ ID NO: 169399 - protein, 9 aa, Homo Sapiens
SAMPSRLMM

SEQ ID NO: 169400 - protein, 9 aa, Homo Sapiens
SAMVRVISV

SEQ ID NO: 169401 - protein, 9 aa, Homo Sapiens
SAMYSRKAM

SEQ ID NO: 169402 - protein, 9 aa, Homo Sapiens
SANDIYLIF

SEQ ID NO: 169403 - protein, 9 aa, Homo Sapiens
SANHNILQI

SEQ ID NO: 169404 - protein, 9 aa, Homo Sapiens
SANIRLTAM

SEQ ID NO: 169405 - protein, 9 aa, Homo Sapiens
SANNVYLVM

SEQ ID NO: 169406 - protein, 9 aa, Homo Sapiens
SANVRTVNL

SEQ ID NO: 169407 - protein, 9 aa, Homo Sapiens
SAPGIISAL

SEQ ID NO: 169408 - protein, 9 aa, Homo Sapiens
SAQDRFLIM

SEQ ID NO: 169409 - protein, 9 aa, Homo Sapiens
SAQDRQLTL

SEQ ID NO: 169410 - protein, 9 aa, Homo Sapiens
SAQFALRLL

SEQ ID NO: 169411 - protein, 9 aa, Homo Sapiens
SAQGKPLAL

SEQ ID NO: 169412 - protein, 9 aa, Homo Sapiens
SARDHAISL

SEQ ID NO: 169413 - protein, 9 aa, Homo Sapiens
SARFRPFTF

SEQ ID NO: 169414 - protein, 9 aa, Homo Sapiens
SARNAFFLL

SEQ ID NO: 169415 - protein, 9 aa, Homo Sapiens
SASAIRKLM

SEQ ID NO: 169416 - protein, 9 aa, Homo Sapiens
SASALAVAL

SEQ ID NO: 169417 - protein, 9 aa, Homo Sapiens
SASDYFKAM

SEQ ID NO: 169418 - protein, 9 aa, Homo Sapiens
SASEVLKEW

SEQ ID NO: 169419 - protein, 9 aa, Homo Sapiens
SASNFYRQF

SEQ ID NO: 169420 - protein, 9 aa, Homo Sapiens
SASPWALTI

SEQ ID NO: 169421 - protein, 9 aa, Homo Sapiens
SASSFFKEL

SEQ ID NO: 169422 - protein, 9 aa, Homo Sapiens
SASSLARAY

SEQ ID NO: 169423 - protein, 9 aa, Homo Sapiens
SASTVFIAL

SEQ ID NO: 169424 - protein, 9 aa, Homo Sapiens
SATALKHVF

SEQ ID NO: 169425 - protein, 9 aa, Homo Sapiens
SATAVAQLY

SEQ ID NO: 169426 - protein, 9 aa, Homo Sapiens
SATDTIRKM

SEQ ID NO: 169427 - protein, 9 aa, Homo Sapiens
SATGLARYY

SEQ ID NO: 169428 - protein, 9 aa, Homo Sapiens
SATHLNISF

SEQ ID NO: 169429 - protein, 9 aa, Homo Sapiens
SATHYVAEL

SEQ ID NO: 169430 - protein, 9 aa, Homo Sapiens
SATLRNVEL

SEQ ID NO: 169431 - protein, 9 aa, Homo Sapiens
SATLRVEDF

SEQ ID NO: 169432 - protein, 9 aa, Homo Sapiens
SATNALRSM

SEQ ID NO: 169433 - protein, 9 aa, Homo Sapiens
SATPTFLFF

SEQ ID NO: 169434 - protein, 9 aa, Homo Sapiens
SATRYIKAL

SEQ ID NO: 169435 - protein, 9 aa, Homo Sapiens
SATSLLHTV

SEQ ID NO: 169436 - protein, 9 aa, Homo Sapiens
SATTSLRVL

SEQ ID NO: 169437 - protein, 9 aa, Homo Sapiens
SATVKIIQM

SEQ ID NO: 169438 - protein, 9 aa, Homo Sapiens
SATWLALSR

SEQ ID NO: 169439 - protein, 9 aa, Homo Sapiens
SATYIAEEY

SEQ ID NO: 169440 - protein, 9 aa, Homo Sapiens
SATYRILEV

SEQ ID NO: 169441 - protein, 9 aa, Homo Sapiens
SAVAAIRTL

SEQ ID NO: 169442 - protein, 9 aa, Homo Sapiens
SAVADVRLY

SEQ ID NO: 169443 - protein, 9 aa, Homo Sapiens
SAVDFIRTL

SEQ ID NO: 169444 - protein, 9 aa, Homo Sapiens
SAVNIIRTF

SEQ ID NO: 169445 - protein, 9 aa, Homo Sapiens
SAVTNIPHV

SEQ ID NO: 169446 - protein, 9 aa, Homo Sapiens
SAVTSVRIL

SEQ ID NO: 169447 - protein, 9 aa, Homo Sapiens
SAVVHEYAL

SEQ ID NO: 169448 - protein, 9 aa, Homo Sapiens
SAWERNLVY

SEQ ID NO: 169449 - protein, 9 aa, Homo Sapiens
SAYARLIDY

SEQ ID NO: 169450 - protein, 9 aa, Homo Sapiens
SAYGSVKAY

SEQ ID NO: 169451 - protein, 9 aa, Homo Sapiens
SAYPLSVEW

SEQ ID NO: 169452 - protein, 9 aa, Homo Sapiens
SAYQRYYSL

SEQ ID NO: 169453 - protein, 9 aa, Homo Sapiens
SAYVKKIQF

SEQ ID NO: 169454 - protein, 9 aa, Homo Sapiens
SCSPFHRNL

SEQ ID NO: 169455 - protein, 9 aa, Homo Sapiens
SCYGYPIQL

SEQ ID NO: 169456 - protein, 9 aa, Homo Sapiens
SFFNRLWEV

SEQ ID NO: 169457 - protein, 9 aa, Homo Sapiens
SFFVRGQEF

SEQ ID NO: 169458 - protein, 9 aa, Homo Sapiens
SFLQRITEY

SEQ ID NO: 169459 - protein, 9 aa, Homo Sapiens
SGAPNLPVY

SEQ ID NO: 169460 - protein, 9 aa, Homo Sapiens
SGLVRLYSF

SEQ ID NO: 169461 - protein, 9 aa, Homo Sapiens
SGTVLRAML

SEQ ID NO: 169462 - protein, 9 aa, Homo Sapiens
SIIGRLLEV

SEQ ID NO: 169463 - protein, 9 aa, Homo Sapiens
SIKDYFLEF

SEQ ID NO: 169464 - protein, 9 aa, Homo Sapiens
SIPTKALEL

SEQ ID NO: 169465 - protein, 9 aa, Homo Sapiens
SISDFFRLF

SEQ ID NO: 169466 - protein, 9 aa, Homo Sapiens
SISDVFRQY

SEQ ID NO: 169467 - protein, 9 aa, Homo Sapiens
SITERYRIY

SEQ ID NO: 169468 - protein, 9 aa, Homo Sapiens
SITRLIKKY

SEQ ID NO: 169469 - protein, 9 aa, Homo Sapiens
SITSVFITK

SEQ ID NO: 169470 - protein, 9 aa, Homo Sapiens
SIVENIRIY

SEQ ID NO: 169471 - protein, 9 aa, Homo Sapiens
SIVEPKPTL

SEQ ID NO: 169472 - protein, 9 aa, Homo Sapiens
SLARMPPPL

SEQ ID NO: 169473 - protein, 9 aa, Homo Sapiens
SLFFRKVPF

SEQ ID NO: 169474 - protein, 9 aa, Homo Sapiens
SLLERLLTY

SEQ ID NO: 169475 - protein, 9 aa, Homo Sapiens
SMAGPRLEI

SEQ ID NO: 169476 - protein, 9 aa, Homo Sapiens
SMDLLGIVL

SEQ ID NO: 169477 - protein, 9 aa, Homo Sapiens
SMIFRKEPF

SEQ ID NO: 169478 - protein, 9 aa, Homo Sapiens
SMLLRLIQY

SEQ ID NO: 169479 - protein, 9 aa, Homo Sapiens
SMQVKTVAY

SEQ ID NO: 169480 - protein, 9 aa, Homo Sapiens
SNMIKTIAF

SEQ ID NO: 169481 - protein, 9 aa, Homo Sapiens
SNTIRSLSF

SEQ ID NO: 169482 - protein, 9 aa, Homo Sapiens
SNTLRPLTY

SEQ ID NO: 169483 - protein, 9 aa, Homo Sapiens
SNYAKLIEM

SEQ ID NO: 169484 - protein, 9 aa, Homo Sapiens
SPNAEIHIL

SEQ ID NO: 169485 - protein, 9 aa, Homo Sapiens
SQAPQRLSF

SEQ ID NO: 169486 - protein, 9 aa, Homo Sapiens
SQQYRPYSF

SEQ ID NO: 169487 - protein, 9 aa, Homo Sapiens
SQSLRILCY

SEQ ID NO: 169488 - protein, 9 aa, Homo Sapiens
SQSLRVDSF

SEQ ID NO: 169489 - protein, 9 aa, Homo Sapiens
SQTPVLREL

SEQ ID NO: 169490 - protein, 9 aa, Homo Sapiens
SSAFAAFVK

SEQ ID NO: 169491 - protein, 9 aa, Homo Sapiens
SSAFTNRIF

SEQ ID NO: 169492 - protein, 9 aa, Homo Sapiens
SSAPPRTAF

SEQ ID NO: 169493 - protein, 9 aa, Homo Sapiens
SSAPTARVF

SEQ ID NO: 169494 - protein, 9 aa, Homo Sapiens
SSAPVPKVM

SEQ ID NO: 169495 - protein, 9 aa, Homo Sapiens
SSASLVLKR

SEQ ID NO: 169496 - protein, 9 aa, Homo Sapiens
SSAVRALEL

SEQ ID NO: 169497 - protein, 9 aa, Homo Sapiens
SSMVRDWVM

SEQ ID NO: 169498 - protein, 9 aa, Homo Sapiens
SSQGTVRFF

SEQ ID NO: 169499 - protein, 9 aa, Homo Sapiens
SSSAVFLII

SEQ ID NO: 169500 - protein, 9 aa, Homo Sapiens
SSSIKTVYF

SEQ ID NO: 169501 - protein, 9 aa, Homo Sapiens
SSSLRSIAL

SEQ ID NO: 169502 - protein, 9 aa, Homo Sapiens
SSSLRVLVY

SEQ ID NO: 169503 - protein, 9 aa, Homo Sapiens
SSSYREAVF

SEQ ID NO: 169504 - protein, 9 aa, Homo Sapiens
SSTPVVLVR

SEQ ID NO: 169505 - protein, 9 aa, Homo Sapiens
SSVEVRMEF

SEQ ID NO: 169506 - protein, 9 aa, Homo Sapiens
SSVPGVRLL

SEQ ID NO: 169507 - protein, 9 aa, Homo Sapiens
STAIREISL

SEQ ID NO: 169508 - protein, 9 aa, Homo Sapiens
STMLRLYEF

SEQ ID NO: 169509 - protein, 9 aa, Homo Sapiens
STSDVVRQY

SEQ ID NO: 169510 - protein, 9 aa, Homo Sapiens
STSKWNHLL

SEQ ID NO: 169511 - protein, 9 aa, Homo Sapiens
SVAVRVLSY

SEQ ID NO: 169512 - protein, 9 aa, Homo Sapiens
SVRPVPLEV

SEQ ID NO: 169513 - protein, 9 aa, Homo Sapiens
SVSPLQRIY

SEQ ID NO: 169514 - protein, 9 aa, Homo Sapiens
SVSPVVRVA

SEQ ID NO: 169515 - protein, 9 aa, Homo Sapiens
SVSTITRIY

SEQ ID NO: 169516 - protein, 9 aa, Homo Sapiens
SVTELDRVY

SEQ ID NO: 169517 - protein, 9 aa, Homo Sapiens
SVTGVHRLY

SEQ ID NO: 169518 - protein, 9 aa, Homo Sapiens
SVTISFRIY

SEQ ID NO: 169519 - protein, 9 aa, Homo Sapiens
SVVFHSTVI

SEQ ID NO: 169520 - protein, 9 aa, Homo Sapiens
TAADIFKQY

SEQ ID NO: 169521 - protein, 9 aa, Homo Sapiens
TAAFWTRLY

SEQ ID NO: 169522 - protein, 9 aa, Homo Sapiens
TAANVYHLL

SEQ ID NO: 169523 - protein, 9 aa, Homo Sapiens
TAAPGRFSF

SEQ ID NO: 169524 - protein, 9 aa, Homo Sapiens
TAAQVARVL

SEQ ID NO: 169525 - protein, 9 aa, Homo Sapiens
TAASLFKEM

SEQ ID NO: 169526 - protein, 9 aa, Homo Sapiens
TAIELIPSV

SEQ ID NO: 169527 - protein, 9 aa, Homo Sapiens
TAIESTPTL

SEQ ID NO: 169528 - protein, 9 aa, Homo Sapiens
TAISLFYEL

SEQ ID NO: 169529 - protein, 9 aa, Homo Sapiens
TALRRGPLL

SEQ ID NO: 169530 - protein, 9 aa, Homo Sapiens
TAMDWFIAV

SEQ ID NO: 169531 - protein, 9 aa, Homo Sapiens
TAQTLVRIL

SEQ ID NO: 169532 - protein, 9 aa, Homo Sapiens
TARDYYTFL

SEQ ID NO: 169533 - protein, 9 aa, Homo Sapiens
TASDKILIV

SEQ ID NO: 169534 - protein, 9 aa, Homo Sapiens
TASEMILVL

SEQ ID NO: 169535 - protein, 9 aa, Homo Sapiens
TASEWERFI

SEQ ID NO: 169536 - protein, 9 aa, Homo Sapiens
TASNPKPYM

SEQ ID NO: 169537 - protein, 9 aa, Homo Sapiens
TASNTFRVV

SEQ ID NO: 169538 - protein, 9 aa, Homo Sapiens
TASNWLHLI

SEQ ID NO: 169539 - protein, 9 aa, Homo Sapiens
TASPFFRAL

SEQ ID NO: 169540 - protein, 9 aa, Homo Sapiens
TASPLVKSV

SEQ ID NO: 169541 - protein, 9 aa, Homo Sapiens
TASPVAVSL

SEQ ID NO: 169542 - protein, 9 aa, Homo Sapiens
TASPVIKAV

SEQ ID NO: 169543 - protein, 9 aa, Homo Sapiens
TASQRFIEL

SEQ ID NO: 169544 - protein, 9 aa, Homo Sapiens
TASRVIREL

SEQ ID NO: 169545 - protein, 9 aa, Homo Sapiens
TATALAIIY

SEQ ID NO: 169546 - protein, 9 aa, Homo Sapiens
TATDIRVAF

SEQ ID NO: 169547 - protein, 9 aa, Homo Sapiens
TATGFSHVL

SEQ ID NO: 169548 - protein, 9 aa, Homo Sapiens
TATHFPRVY

SEQ ID NO: 169549 - protein, 9 aa, Homo Sapiens
TATMHILVV

SEQ ID NO: 169550 - protein, 9 aa, Homo Sapiens
TATQAIRIF

SEQ ID NO: 169551 - protein, 9 aa, Homo Sapiens
TATQLLKLA

SEQ ID NO: 169552 - protein, 9 aa, Homo Sapiens
TATVRSVHF

SEQ ID NO: 169553 - protein, 9 aa, Homo Sapiens
TAVALLRLL

SEQ ID NO: 169554 - protein, 9 aa, Homo Sapiens
TAVENMPSL

SEQ ID NO: 169555 - protein, 9 aa, Homo Sapiens
TAVMPKVSL

SEQ ID NO: 169556 - protein, 9 aa, Homo Sapiens
TAVVKFIDY

SEQ ID NO: 169557 - protein, 9 aa, Homo Sapiens
TAVWLPRYY

SEQ ID NO: 169558 - protein, 9 aa, Homo Sapiens
TCTLKLLEY

SEQ ID NO: 169559 - protein, 9 aa, Homo Sapiens
TFALRYLNF

SEQ ID NO: 169560 - protein, 9 aa, Homo Sapiens
TFDLLRNSY

SEQ ID NO: 169561 - protein, 9 aa, Homo Sapiens
TFFQRAVYL

SEQ ID NO: 169562 - protein, 9 aa, Homo Sapiens
TFFSRGLSF

SEQ ID NO: 169563 - protein, 9 aa, Homo Sapiens
TFGERVVAF

SEQ ID NO: 169564 - protein, 9 aa, Homo Sapiens
TFHQRGIAL

SEQ ID NO: 169565 - protein, 9 aa, Homo Sapiens
TFIDPRIPL

SEQ ID NO: 169566 - protein, 9 aa, Homo Sapiens
TFMEKLYPY

SEQ ID NO: 169567 - protein, 9 aa, Homo Sapiens
TFNLRPNEF

SEQ ID NO: 169568 - protein, 9 aa, Homo Sapiens
TFQLRGLEF

SEQ ID NO: 169569 - protein, 9 aa, Homo Sapiens
TFSQRKVEF

SEQ ID NO: 169570 - protein, 9 aa, Homo Sapiens
TFTERMMAY

SEQ ID NO: 169571 - protein, 9 aa, Homo Sapiens
TGMVRETVF

SEQ ID NO: 169572 - protein, 9 aa, Homo Sapiens
TIREFFILL

SEQ ID NO: 169573 - protein, 9 aa, Homo Sapiens
TITDQIRLW

SEQ ID NO: 169574 - protein, 9 aa, Homo Sapiens
TITEPYRTL

SEQ ID NO: 169575 - protein, 9 aa, Homo Sapiens
TITQVIKVL

SEQ ID NO: 169576 - protein, 9 aa, Homo Sapiens
TITSYIKEM

SEQ ID NO: 169577 - protein, 9 aa, Homo Sapiens
TLLERLFSY

SEQ ID NO: 169578 - protein, 9 aa, Homo Sapiens
TLNERFTSY

SEQ ID NO: 169579 - protein, 9 aa, Homo Sapiens
TLQERLLAF

SEQ ID NO: 169580 - protein, 9 aa, Homo Sapiens
TLTALVRYY

SEQ ID NO: 169581 - protein, 9 aa, Homo Sapiens
TLTDVAHEY

SEQ ID NO: 169582 - protein, 9 aa, Homo Sapiens
TMPDTPRLF

SEQ ID NO: 169583 - protein, 9 aa, Homo Sapiens
TNTLRILAL

SEQ ID NO: 169584 - protein, 9 aa, Homo Sapiens
TQAVRAVAF

SEQ ID NO: 169585 - protein, 9 aa, Homo Sapiens
TSFERALSL

SEQ ID NO: 169586 - protein, 9 aa, Homo Sapiens
TSFERMLSL

SEQ ID NO: 169587 - protein, 9 aa, Homo Sapiens
TSFIRTIEL

SEQ ID NO: 169588 - protein, 9 aa, Homo Sapiens
TSPEAFLAL

SEQ ID NO: 169589 - protein, 9 aa, Homo Sapiens
TSQFRPVEL

SEQ ID NO: 169590 - protein, 9 aa, Homo Sapiens
TSSFQPVSM

SEQ ID NO: 169591 - protein, 9 aa, Homo Sapiens
TSSLPKYPL

SEQ ID NO: 169592 - protein, 9 aa, Homo Sapiens
TSSLRSVCF

SEQ ID NO: 169593 - protein, 9 aa, Homo Sapiens
TSSPPRLAM

SEQ ID NO: 169594 - protein, 9 aa, Homo Sapiens
TSSTRFLVF

SEQ ID NO: 169595 - protein, 9 aa, Homo Sapiens
TSSWVIRDL

SEQ ID NO: 169596 - protein, 9 aa, Homo Sapiens
TSTGVIRDF

SEQ ID NO: 169597 - protein, 9 aa, Homo Sapiens
TSYVRPVKF

SEQ ID NO: 169598 - protein, 9 aa, Homo Sapiens
TTRDYYFAL

SEQ ID NO: 169599 - protein, 9 aa, Homo Sapiens
TTSERIIAY

SEQ ID NO: 169600 - protein, 9 aa, Homo Sapiens
TTSLRVLAL

SEQ ID NO: 169601 - protein, 9 aa, Homo Sapiens
TTSWIHPVM

SEQ ID NO: 169602 - protein, 9 aa, Homo Sapiens
TTTNRDIAF

SEQ ID NO: 169603 - protein, 9 aa, Homo Sapiens
TTTSLLRSL

SEQ ID NO: 169604 - protein, 9 aa, Homo Sapiens
TTTSSSRIF

SEQ ID NO: 169605 - protein, 9 aa, Homo Sapiens
TTTTEHRFF

SEQ ID NO: 169606 - protein, 9 aa, Homo Sapiens
TVALRAAAY

SEQ ID NO: 169607 - protein, 9 aa, Homo Sapiens
TVALRGYAF

SEQ ID NO: 169608 - protein, 9 aa, Homo Sapiens
TVFLRSDSY

SEQ ID NO: 169609 - protein, 9 aa, Homo Sapiens
TVSEWLRLL

SEQ ID NO: 169610 - protein, 9 aa, Homo Sapiens
TVTDVVRFI

SEQ ID NO: 169611 - protein, 9 aa, Homo Sapiens
TVTSYLKLL

SEQ ID NO: 169612 - protein, 9 aa, Homo Sapiens
TVTTVILEV

SEQ ID NO: 169613 - protein, 9 aa, Homo Sapiens
TVWAYFRVM

SEQ ID NO: 169614 - protein, 9 aa, Homo Sapiens
TVYLRDIAL

SEQ ID NO: 169615 - protein, 9 aa, Homo Sapiens
TYGERVVAF

SEQ ID NO: 169616 - protein, 9 aa, Homo Sapiens
VAAALARLL

SEQ ID NO: 169617 - protein, 9 aa, Homo Sapiens
VAAKKNVSI

SEQ ID NO: 169618 - protein, 9 aa, Homo Sapiens
VAALLTRTF

SEQ ID NO: 169619 - protein, 9 aa, Homo Sapiens
VAAMQPRML

SEQ ID NO: 169620 - protein, 9 aa, Homo Sapiens
VAAPKHWML

SEQ ID NO: 169621 - protein, 9 aa, Homo Sapiens
VAAPQLPVL

SEQ ID NO: 169622 - protein, 9 aa, Homo Sapiens
VAASLVREF

SEQ ID NO: 169623 - protein, 9 aa, Homo Sapiens
VAATLLKQL

SEQ ID NO: 169624 - protein, 9 aa, Homo Sapiens
VAATRWWQL

SEQ ID NO: 169625 - protein, 9 aa, Homo Sapiens
VAAVGNRLY

SEQ ID NO: 169626 - protein, 9 aa, Homo Sapiens
VAAVLVKKY

SEQ ID NO: 169627 - protein, 9 aa, Homo Sapiens
VAAVRAAAW

SEQ ID NO: 169628 - protein, 9 aa, Homo Sapiens
VAAVREFYL

SEQ ID NO: 169629 - protein, 9 aa, Homo Sapiens
VAAWLKKIF

SEQ ID NO: 169630 - protein, 9 aa, Homo Sapiens
VACPPPPAY

SEQ ID NO: 169631 - protein, 9 aa, Homo Sapiens
VAFFRENGF

SEQ ID NO: 169632 - protein, 9 aa, Homo Sapiens
VAFLRLEDF

SEQ ID NO: 169633 - protein, 9 aa, Homo Sapiens
VAIAAARVW

SEQ ID NO: 169634 - protein, 9 aa, Homo Sapiens
VAIAGLMEV

SEQ ID NO: 169635 - protein, 9 aa, Homo Sapiens
VAIAKVKLY

SEQ ID NO: 169636 - protein, 9 aa, Homo Sapiens
VAIDRGLAF

SEQ ID NO: 169637 - protein, 9 aa, Homo Sapiens
VAIESTPMI

SEQ ID NO: 169638 - protein, 9 aa, Homo Sapiens
VAIPLKYEV

SEQ ID NO: 169639 - protein, 9 aa, Homo Sapiens
VAISPWKTY

SEQ ID NO: 169640 - protein, 9 aa, Homo Sapiens
VAIVKALYY

SEQ ID NO: 169641 - protein, 9 aa, Homo Sapiens
VAIWGRVVF

SEQ ID NO: 169642 - protein, 9 aa, Homo Sapiens
VAKAVTQAL

SEQ ID NO: 169643 - protein, 9 aa, Homo Sapiens
VAKDYPFYL

SEQ ID NO: 169644 - protein, 9 aa, Homo Sapiens
VAKDYVRLM

SEQ ID NO: 169645 - protein, 9 aa, Homo Sapiens
VAKEIIYTL

SEQ ID NO: 169646 - protein, 9 aa, Homo Sapiens
VAKMYISEL

SEQ ID NO: 169647 - protein, 9 aa, Homo Sapiens
VAKPIPEEL

SEQ ID NO: 169648 - protein, 9 aa, Homo Sapiens
VAKPNFVVM

SEQ ID NO: 169649 - protein, 9 aa, Homo Sapiens
VALDFEQEM

SEQ ID NO: 169650 - protein, 9 aa, Homo Sapiens
VALGNMYEL

SEQ ID NO: 169651 - protein, 9 aa, Homo Sapiens
VALLRLLLL

SEQ ID NO: 169652 - protein, 9 aa, Homo Sapiens
VALLRVTPF

SEQ ID NO: 169653 - protein, 9 aa, Homo Sapiens
VALPMVLVL

SEQ ID NO: 169654 - protein, 9 aa, Homo Sapiens
VALPPGLAV

SEQ ID NO: 169655 - protein, 9 aa, Homo Sapiens
VALPVFLVI

SEQ ID NO: 169656 - protein, 9 aa, Homo Sapiens
VALPYFWEH

SEQ ID NO: 169657 - protein, 9 aa, Homo Sapiens
VALYNPVSF

SEQ ID NO: 169658 - protein, 9 aa, Homo Sapiens
VAMIYPLEY

SEQ ID NO: 169659 - protein, 9 aa, Homo Sapiens
VAMKFAQVF

SEQ ID NO: 169660 - protein, 9 aa, Homo Sapiens
VAMPGVPAF

SEQ ID NO: 169661 - protein, 9 aa, Homo Sapiens
VAMPYQWEY

SEQ ID NO: 169662 - protein, 9 aa, Homo Sapiens
VAMYGGLVL

SEQ ID NO: 169663 - protein, 9 aa, Homo Sapiens
VANAIIHLF

SEQ ID NO: 169664 - protein, 9 aa, Homo Sapiens
VANDYARQL

SEQ ID NO: 169665 - protein, 9 aa, Homo Sapiens
VANPAFLKY

SEQ ID NO: 169666 - protein, 9 aa, Homo Sapiens
VANPEHMEM

SEQ ID NO: 169667 - protein, 9 aa, Homo Sapiens
VANPNSAIF

SEQ ID NO: 169668 - protein, 9 aa, Homo Sapiens
VANPRLDTF

SEQ ID NO: 169669 - protein, 9 aa, Homo Sapiens
VANPSHLEA

SEQ ID NO: 169670 - protein, 9 aa, Homo Sapiens
VANTMRTSL

SEQ ID NO: 169671 - protein, 9 aa, Homo Sapiens
VANVFLEAY

SEQ ID NO: 169672 - protein, 9 aa, Homo Sapiens
VANVSLLAL

SEQ ID NO: 169673 - protein, 9 aa, Homo Sapiens
VAPEEHPVL

SEQ ID NO: 169674 - protein, 9 aa, Homo Sapiens
VAQITQRFY

SEQ ID NO: 169675 - protein, 9 aa, Homo Sapiens
VAQPVPLLM

SEQ ID NO: 169676 - protein, 9 aa, Homo Sapiens
VAQTWFRFL

SEQ ID NO: 169677 - protein, 9 aa, Homo Sapiens
VAQYRPEEY

SEQ ID NO: 169678 - protein, 9 aa, Homo Sapiens
VARDLRAEF

SEQ ID NO: 169679 - protein, 9 aa, Homo Sapiens
VAREWFFLI

SEQ ID NO: 169680 - protein, 9 aa, Homo Sapiens
VARLLEVPV

SEQ ID NO: 169681 - protein, 9 aa, Homo Sapiens
VARPAPVAV

SEQ ID NO: 169682 - protein, 9 aa, Homo Sapiens
VARPDVVEM

SEQ ID NO: 169683 - protein, 9 aa, Homo Sapiens
VARPPNIVL

SEQ ID NO: 169684 - protein, 9 aa, Homo Sapiens
VARSNILTL

SEQ ID NO: 169685 - protein, 9 aa, Homo Sapiens
VARVESLEM

SEQ ID NO: 169686 - protein, 9 aa, Homo Sapiens
VASALWRHF

SEQ ID NO: 169687 - protein, 9 aa, Homo Sapiens
VASEVYKAV

SEQ ID NO: 169688 - protein, 9 aa, Homo Sapiens
VASFPRTVL

SEQ ID NO: 169689 - protein, 9 aa, Homo Sapiens
VASFRSKAY

SEQ ID NO: 169690 - protein, 9 aa, Homo Sapiens
VASFSKRFF

SEQ ID NO: 169691 - protein, 9 aa, Homo Sapiens
VASGMILVM

SEQ ID NO: 169692 - protein, 9 aa, Homo Sapiens
VASIRLFGF

SEQ ID NO: 169693 - protein, 9 aa, Homo Sapiens
VASKILKTF

SEQ ID NO: 169694 - protein, 9 aa, Homo Sapiens
VASMTVREL

SEQ ID NO: 169695 - protein, 9 aa, Homo Sapiens
VASNVPKVV

SEQ ID NO: 169696 - protein, 9 aa, Homo Sapiens
VASPALRAV

SEQ ID NO: 169697 - protein, 9 aa, Homo Sapiens
VASPQVHFI

SEQ ID NO: 169698 - protein, 9 aa, Homo Sapiens
VASQLPRIF

SEQ ID NO: 169699 - protein, 9 aa, Homo Sapiens
VASVGHGVF

SEQ ID NO: 169700 - protein, 9 aa, Homo Sapiens
VASVPKELY

SEQ ID NO: 169701 - protein, 9 aa, Homo Sapiens
VASVRPAVL

SEQ ID NO: 169702 - protein, 9 aa, Homo Sapiens
VATAMARVL

SEQ ID NO: 169703 - protein, 9 aa, Homo Sapiens
VATAQGRYY

SEQ ID NO: 169704 - protein, 9 aa, Homo Sapiens
VATEKAVEL

SEQ ID NO: 169705 - protein, 9 aa, Homo Sapiens
VATEVLMWF

SEQ ID NO: 169706 - protein, 9 aa, Homo Sapiens
VATFFAKML

SEQ ID NO: 169707 - protein, 9 aa, Homo Sapiens
VATIKSVSF

SEQ ID NO: 169708 - protein, 9 aa, Homo Sapiens
VATNLLKLF

SEQ ID NO: 169709 - protein, 9 aa, Homo Sapiens
VATPVLIPK

SEQ ID NO: 169710 - protein, 9 aa, Homo Sapiens
VATQVGIEW

SEQ ID NO: 169711 - protein, 9 aa, Homo Sapiens
VATSFIRTI

SEQ ID NO: 169712 - protein, 9 aa, Homo Sapiens
VATSPGRLF

SEQ ID NO: 169713 - protein, 9 aa, Homo Sapiens
VATSRIIKY

SEQ ID NO: 169714 - protein, 9 aa, Homo Sapiens
VATTFTHSY

SEQ ID NO: 169715 - protein, 9 aa, Homo Sapiens
VATTRDYYF

SEQ ID NO: 169716 - protein, 9 aa, Homo Sapiens
VATTRIETM

SEQ ID NO: 169717 - protein, 9 aa, Homo Sapiens
VATVQISSL

SEQ ID NO: 169718 - protein, 9 aa, Homo Sapiens
VATWFNQPA

SEQ ID NO: 169719 - protein, 9 aa, Homo Sapiens
VAVDVAVPK

SEQ ID NO: 169720 - protein, 9 aa, Homo Sapiens
VAVGRALYY

SEQ ID NO: 169721 - protein, 9 aa, Homo Sapiens
VAVHYYRLY

SEQ ID NO: 169722 - protein, 9 aa, Homo Sapiens
VAVILMRVL

SEQ ID NO: 169723 - protein, 9 aa, Homo Sapiens
VAVLRAYNY

SEQ ID NO: 169724 - protein, 9 aa, Homo Sapiens
VAVMTVREL

SEQ ID NO: 169725 - protein, 9 aa, Homo Sapiens
VAVNKPAEF

SEQ ID NO: 169726 - protein, 9 aa, Homo Sapiens
VAVNYIPEV

SEQ ID NO: 169727 - protein, 9 aa, Homo Sapiens
VAVVKGLTY

SEQ ID NO: 169728 - protein, 9 aa, Homo Sapiens
VAVWEGRIY

SEQ ID NO: 169729 - protein, 9 aa, Homo Sapiens
VAVWNGRQV

SEQ ID NO: 169730 - protein, 9 aa, Homo Sapiens
VAWNPSPAV

SEQ ID NO: 169731 - protein, 9 aa, Homo Sapiens
VAWPNPREI

SEQ ID NO: 169732 - protein, 9 aa, Homo Sapiens
VAYLRFLEL

SEQ ID NO: 169733 - protein, 9 aa, Homo Sapiens
VAYMNPIAM

SEQ ID NO: 169734 - protein, 9 aa, Homo Sapiens
VAYVSSVAL

SEQ ID NO: 169735 - protein, 9 aa, Homo Sapiens
VAYWRQAGL

SEQ ID NO: 169736 - protein, 9 aa, Homo Sapiens
VCTFVYKEF

SEQ ID NO: 169737 - protein, 9 aa, Homo Sapiens
VFALRPVGF

SEQ ID NO: 169738 - protein, 9 aa, Homo Sapiens
VFFSRGSSF

SEQ ID NO: 169739 - protein, 9 aa, Homo Sapiens
VFGIRYDDY

SEQ ID NO: 169740 - protein, 9 aa, Homo Sapiens
VFHDRRLQY

SEQ ID NO: 169741 - protein, 9 aa, Homo Sapiens
VFQLRDSVY

SEQ ID NO: 169742 - protein, 9 aa, Homo Sapiens
VFQYRLVEY

SEQ ID NO: 169743 - protein, 9 aa, Homo Sapiens
VFSFKMVSY

SEQ ID NO: 169744 - protein, 9 aa, Homo Sapiens
VFSHRLSVY

SEQ ID NO: 169745 - protein, 9 aa, Homo Sapiens
VFSVRGTSF

SEQ ID NO: 169746 - protein, 9 aa, Homo Sapiens
VGAALRPAF

SEQ ID NO: 169747 - protein, 9 aa, Homo Sapiens
VGAIRNAAF

SEQ ID NO: 169748 - protein, 9 aa, Homo Sapiens
VGFNRLLEY

SEQ ID NO: 169749 - protein, 9 aa, Homo Sapiens
VGGVQPVSI

SEQ ID NO: 169750 - protein, 9 aa, Homo Sapiens
VGSFRSNSF

SEQ ID NO: 169751 - protein, 9 aa, Homo Sapiens
VGTKSTRFF

SEQ ID NO: 169752 - protein, 9 aa, Homo Sapiens
VIGDVIRVY

SEQ ID NO: 169753 - protein, 9 aa, Homo Sapiens
VIIDDHPEV

SEQ ID NO: 169754 - protein, 9 aa, Homo Sapiens
VIIDDRHVY

SEQ ID NO: 169755 - protein, 9 aa, Homo Sapiens
VINGNIKTV

SEQ ID NO: 169756 - protein, 9 aa, Homo Sapiens
VIPTNVPEL

SEQ ID NO: 169757 - protein, 9 aa, Homo Sapiens
VLAIRQQSF

SEQ ID NO: 169758 - protein, 9 aa, Homo Sapiens
VLAIRYDAF

SEQ ID NO: 169759 - protein, 9 aa, Homo Sapiens
VLALRPWSF

SEQ ID NO: 169760 - protein, 9 aa, Homo Sapiens
VLFLRTFQF

SEQ ID NO: 169761 - protein, 9 aa, Homo Sapiens
VLMERLCKY

SEQ ID NO: 169762 - protein, 9 aa, Homo Sapiens
VLQAPLPPM

SEQ ID NO: 169763 - protein, 9 aa, Homo Sapiens
VLQLRVHTF

SEQ ID NO: 169764 - protein, 9 aa, Homo Sapiens
VLQQRLIAL

SEQ ID NO: 169765 - protein, 9 aa, Homo Sapiens
VLRQPRPAL

SEQ ID NO: 169766 - protein, 9 aa, Homo Sapiens
VNALRPFYF

SEQ ID NO: 169767 - protein, 9 aa, Homo Sapiens
VNIMRTYTY

SEQ ID NO: 169768 - protein, 9 aa, Homo Sapiens
VNNPHFLIM

SEQ ID NO: 169769 - protein, 9 aa, Homo Sapiens
VNTEKLTAF

SEQ ID NO: 169770 - protein, 9 aa, Homo Sapiens
VQAIRITSY

SEQ ID NO: 169771 - protein, 9 aa, Homo Sapiens
VQALRTVSL

SEQ ID NO: 169772 - protein, 9 aa, Homo Sapiens
VQMQREWSF

SEQ ID NO: 169773 - protein, 9 aa, Homo Sapiens
VSALFSRIF

SEQ ID NO: 169774 - protein, 9 aa, Homo Sapiens
VSAPLRLQA

SEQ ID NO: 169775 - protein, 9 aa, Homo Sapiens
VSAPPMPSV

SEQ ID NO: 169776 - protein, 9 aa, Homo Sapiens
VSASLPRSY

SEQ ID NO: 169777 - protein, 9 aa, Homo Sapiens
VSGPGRPEL

SEQ ID NO: 169778 - protein, 9 aa, Homo Sapiens
VSHVRKLVF

SEQ ID NO: 169779 - protein, 9 aa, Homo Sapiens
VSLLREVQY

SEQ ID NO: 169780 - protein, 9 aa, Homo Sapiens
VSLLRLYQY

SEQ ID NO: 169781 - protein, 9 aa, Homo Sapiens
VSLLRVLEM

SEQ ID NO: 169782 - protein, 9 aa, Homo Sapiens
VSLVASRVI

SEQ ID NO: 169783 - protein, 9 aa, Homo Sapiens
VSNFKPGVY

SEQ ID NO: 169784 - protein, 9 aa, Homo Sapiens
VSNVKPLSL

SEQ ID NO: 169785 - protein, 9 aa, Homo Sapiens
VSRPLFLVL

SEQ ID NO: 169786 - protein, 9 aa, Homo Sapiens
VSSFRPNEF

SEQ ID NO: 169787 - protein, 9 aa, Homo Sapiens
VSSFVLRAM

SEQ ID NO: 169788 - protein, 9 aa, Homo Sapiens
VSSGVQRVL

SEQ ID NO: 169789 - protein, 9 aa, Homo Sapiens
VSSHVERVF

SEQ ID NO: 169790 - protein, 9 aa, Homo Sapiens
VSSTKLVSF

SEQ ID NO: 169791 - protein, 9 aa, Homo Sapiens
VSSTWDRQF

SEQ ID NO: 169792 - protein, 9 aa, Homo Sapiens
VSSTWLRDF

SEQ ID NO: 169793 - protein, 9 aa, Homo Sapiens
VSSVRWISY

SEQ ID NO: 169794 - protein, 9 aa, Homo Sapiens
VSTDVIRRV

SEQ ID NO: 169795 - protein, 9 aa, Homo Sapiens
VSTHVSQIF

SEQ ID NO: 169796 - protein, 9 aa, Homo Sapiens
VSTLWLHLL

SEQ ID NO: 169797 - protein, 9 aa, Homo Sapiens
VSTPFHEIM

SEQ ID NO: 169798 - protein, 9 aa, Homo Sapiens
VSTPISEVY

SEQ ID NO: 169799 - protein, 9 aa, Homo Sapiens
VSTPQRPPL

SEQ ID NO: 169800 - protein, 9 aa, Homo Sapiens
VSTPRSSFY

SEQ ID NO: 169801 - protein, 9 aa, Homo Sapiens
VSTSYIKVW

SEQ ID NO: 169802 - protein, 9 aa, Homo Sapiens
VSTVLTSKY

SEQ ID NO: 169803 - protein, 9 aa, Homo Sapiens
VSTWRPVEL

SEQ ID NO: 169804 - protein, 9 aa, Homo Sapiens
VSVDTARTL

SEQ ID NO: 169805 - protein, 9 aa, Homo Sapiens
VSVTHRPPL

SEQ ID NO: 169806 - protein, 9 aa, Homo Sapiens
VSYLRAKSF

SEQ ID NO: 169807 - protein, 9 aa, Homo Sapiens
VSYLRPLDF

SEQ ID NO: 169808 - protein, 9 aa, Homo Sapiens
VSYLRVKSF

SEQ ID NO: 169809 - protein, 9 aa, Homo Sapiens
VSYVRSVYL

SEQ ID NO: 169810 - protein, 9 aa, Homo Sapiens
VTAGVRLAM

SEQ ID NO: 169811 - protein, 9 aa, Homo Sapiens
VTIVKPIVY

SEQ ID NO: 169812 - protein, 9 aa, Homo Sapiens
VTKEFFLLL

SEQ ID NO: 169813 - protein, 9 aa, Homo Sapiens
VTQLRLIFY

SEQ ID NO: 169814 - protein, 9 aa, Homo Sapiens
VTSDGRYVF

SEQ ID NO: 169815 - protein, 9 aa, Homo Sapiens
VTSELLRLL

SEQ ID NO: 169816 - protein, 9 aa, Homo Sapiens
VTSEVNRLL

SEQ ID NO: 169817 - protein, 9 aa, Homo Sapiens
VTSFRFVYF

SEQ ID NO: 169818 - protein, 9 aa, Homo Sapiens
VTSGKIIEY

SEQ ID NO: 169819 - protein, 9 aa, Homo Sapiens
VTSPIRASY

SEQ ID NO: 169820 - protein, 9 aa, Homo Sapiens
VTSPLTVEW

SEQ ID NO: 169821 - protein, 9 aa, Homo Sapiens
VTTGLLTYL

SEQ ID NO: 169822 - protein, 9 aa, Homo Sapiens
VTTTWERLY

SEQ ID NO: 169823 - protein, 9 aa, Homo Sapiens
VVIDPTRTI

SEQ ID NO: 169824 - protein, 9 aa, Homo Sapiens
VVIDPYLVY

SEQ ID NO: 169825 - protein, 9 aa, Homo Sapiens
VVSDAIFEL

SEQ ID NO: 169826 - protein, 9 aa, Homo Sapiens
VVSPPKFVF

SEQ ID NO: 169827 - protein, 9 aa, Homo Sapiens
VVSVPQRIM

SEQ ID NO: 169828 - protein, 9 aa, Homo Sapiens
VWFDRRTNY

SEQ ID NO: 169829 - protein, 9 aa, Homo Sapiens
VWKLRIVSY

SEQ ID NO: 169830 - protein, 9 aa, Homo Sapiens
VWNMRLVFF

SEQ ID NO: 169831 - protein, 9 aa, Homo Sapiens
VWWYRPFQY

SEQ ID NO: 169832 - protein, 9 aa, Homo Sapiens
WAAPIRKLY

SEQ ID NO: 169833 - protein, 9 aa, Homo Sapiens
WAMDLRPEL

SEQ ID NO: 169834 - protein, 9 aa, Homo Sapiens
YAAAQLRQY

SEQ ID NO: 169835 - protein, 9 aa, Homo Sapiens
YAAFKRWHF

SEQ ID NO: 169836 - protein, 9 aa, Homo Sapiens
YAAGAKLVL

SEQ ID NO: 169837 - protein, 9 aa, Homo Sapiens
YAAIQENAL

SEQ ID NO: 169838 - protein, 9 aa, Homo Sapiens
YAAIRDNYF

SEQ ID NO: 169839 - protein, 9 aa, Homo Sapiens
YAAIRYDTV

SEQ ID NO: 169840 - protein, 9 aa, Homo Sapiens
YAALHGEFY

SEQ ID NO: 169841 - protein, 9 aa, Homo Sapiens
YAALHHRIL

SEQ ID NO: 169842 - protein, 9 aa, Homo Sapiens
YAANLKNVM

SEQ ID NO: 169843 - protein, 9 aa, Homo Sapiens
YAAPHFFHL

SEQ ID NO: 169844 - protein, 9 aa, Homo Sapiens
YAAPWFLTL

SEQ ID NO: 169845 - protein, 9 aa, Homo Sapiens
YAAQAHLKL

SEQ ID NO: 169846 - protein, 9 aa, Homo Sapiens
YAAQLERQL

SEQ ID NO: 169847 - protein, 9 aa, Homo Sapiens
YAAQRIISL

SEQ ID NO: 169848 - protein, 9 aa, Homo Sapiens
YAASFINLL

SEQ ID NO: 169849 - protein, 9 aa, Homo Sapiens
YAASSYLSL

SEQ ID NO: 169850 - protein, 9 aa, Homo Sapiens
YAATYPRQL

SEQ ID NO: 169851 - protein, 9 aa, Homo Sapiens
YAAVKIHQL

SEQ ID NO: 169852 - protein, 9 aa, Homo Sapiens
YAAYPLTEV

SEQ ID NO: 169853 - protein, 9 aa, Homo Sapiens
YAFAHILTV

SEQ ID NO: 169854 - protein, 9 aa, Homo Sapiens
YAFGGGCEL

SEQ ID NO: 169855 - protein, 9 aa, Homo Sapiens
YAFLRREYY

SEQ ID NO: 169856 - protein, 9 aa, Homo Sapiens
YAFNMKATV

SEQ ID NO: 169857 - protein, 9 aa, Homo Sapiens
YAFPKAVSV

SEQ ID NO: 169858 - protein, 9 aa, Homo Sapiens
YAFPKEFPY

SEQ ID NO: 169859 - protein, 9 aa, Homo Sapiens
YAFPKSITV

SEQ ID NO: 169860 - protein, 9 aa, Homo Sapiens
YAFPLAHSL

SEQ ID NO: 169861 - protein, 9 aa, Homo Sapiens
YAFSRRFAW

SEQ ID NO: 169862 - protein, 9 aa, Homo Sapiens
YAFVRPVIL

SEQ ID NO: 169863 - protein, 9 aa, Homo Sapiens
YAGLKLVEY

SEQ ID NO: 169864 - protein, 9 aa, Homo Sapiens
YAHFPINVV

SEQ ID NO: 169865 - protein, 9 aa, Homo Sapiens
YAHLTPREL

SEQ ID NO: 169866 - protein, 9 aa, Homo Sapiens
YAIDNPLHY

SEQ ID NO: 169867 - protein, 9 aa, Homo Sapiens
YAIDSVLEV

SEQ ID NO: 169868 - protein, 9 aa, Homo Sapiens
YAIEKVREI

SEQ ID NO: 169869 - protein, 9 aa, Homo Sapiens
YAIESQLQL

SEQ ID NO: 169870 - protein, 9 aa, Homo Sapiens
YAIFRILLY

SEQ ID NO: 169871 - protein, 9 aa, Homo Sapiens
YAIGVSHPL

SEQ ID NO: 169872 - protein, 9 aa, Homo Sapiens
YAIHGVLEV

SEQ ID NO: 169873 - protein, 9 aa, Homo Sapiens
YAISKPEVL

SEQ ID NO: 169874 - protein, 9 aa, Homo Sapiens
YAITTLHNL

SEQ ID NO: 169875 - protein, 9 aa, Homo Sapiens
YAIVRFNQY

SEQ ID NO: 169876 - protein, 9 aa, Homo Sapiens
YAKDDPLEF

SEQ ID NO: 169877 - protein, 9 aa, Homo Sapiens
YAKIVEIPF

SEQ ID NO: 169878 - protein, 9 aa, Homo Sapiens
YAKLFADAV

SEQ ID NO: 169879 - protein, 9 aa, Homo Sapiens
YAKMIFMEL

SEQ ID NO: 169880 - protein, 9 aa, Homo Sapiens
YAKPYFLRL

SEQ ID NO: 169881 - protein, 9 aa, Homo Sapiens
YAKRPGIGL

SEQ ID NO: 169882 - protein, 9 aa, Homo Sapiens
YALELLTVY

SEQ ID NO: 169883 - protein, 9 aa, Homo Sapiens
YALERLKVM

SEQ ID NO: 169884 - protein, 9 aa, Homo Sapiens
YALLNLYEH

SEQ ID NO: 169885 - protein, 9 aa, Homo Sapiens
YALNHTLSV

SEQ ID NO: 169886 - protein, 9 aa, Homo Sapiens
YALPAGLEV

SEQ ID NO: 169887 - protein, 9 aa, Homo Sapiens
YALTSPLQL

SEQ ID NO: 169888 - protein, 9 aa, Homo Sapiens
YALYNNWEH

SEQ ID NO: 169889 - protein, 9 aa, Homo Sapiens
YALYQIKEM

SEQ ID NO: 169890 - protein, 9 aa, Homo Sapiens
YAMDELRSL

SEQ ID NO: 169891 - protein, 9 aa, Homo Sapiens
YAMDIVKGL

SEQ ID NO: 169892 - protein, 9 aa, Homo Sapiens
YANAKIYKL

SEQ ID NO: 169893 - protein, 9 aa, Homo Sapiens
YANDVTRVL

SEQ ID NO: 169894 - protein, 9 aa, Homo Sapiens
YANLMLLTL

SEQ ID NO: 169895 - protein, 9 aa, Homo Sapiens
YANYFIRLL

SEQ ID NO: 169896 - protein, 9 aa, Homo Sapiens
YANYYTREV

SEQ ID NO: 169897 - protein, 9 aa, Homo Sapiens
YAPYPSPVL

SEQ ID NO: 169898 - protein, 9 aa, Homo Sapiens
YAQIRTIAI

SEQ ID NO: 169899 - protein, 9 aa, Homo Sapiens
YAQLHSFTL

SEQ ID NO: 169900 - protein, 9 aa, Homo Sapiens
YAQLHSLTL

SEQ ID NO: 169901 - protein, 9 aa, Homo Sapiens
YAQQWNQYY

SEQ ID NO: 169902 - protein, 9 aa, Homo Sapiens
YARLHPRAV

SEQ ID NO: 169903 - protein, 9 aa, Homo Sapiens
YARLLALDM

SEQ ID NO: 169904 - protein, 9 aa, Homo Sapiens
YARLYPVLL

SEQ ID NO: 169905 - protein, 9 aa, Homo Sapiens
YARPSSEVI

SEQ ID NO: 169906 - protein, 9 aa, Homo Sapiens
YARQLEMIV

SEQ ID NO: 169907 - protein, 9 aa, Homo Sapiens
YARVSVRTV

SEQ ID NO: 169908 - protein, 9 aa, Homo Sapiens
YASGVERTI

SEQ ID NO: 169909 - protein, 9 aa, Homo Sapiens
YASLHGRIY

SEQ ID NO: 169910 - protein, 9 aa, Homo Sapiens
YASLRIEEL

SEQ ID NO: 169911 - protein, 9 aa, Homo Sapiens
YASPVVAFY

SEQ ID NO: 169912 - protein, 9 aa, Homo Sapiens
YASQQIRQI

SEQ ID NO: 169913 - protein, 9 aa, Homo Sapiens
YASQWFLTL

SEQ ID NO: 169914 - protein, 9 aa, Homo Sapiens
YASQYIARY

SEQ ID NO: 169915 - protein, 9 aa, Homo Sapiens
YASVVVKRY

SEQ ID NO: 169916 - protein, 9 aa, Homo Sapiens
YATASLRKL

SEQ ID NO: 169917 - protein, 9 aa, Homo Sapiens
YATEKLRMI

SEQ ID NO: 169918 - protein, 9 aa, Homo Sapiens
YATFIVTNY

SEQ ID NO: 169919 - protein, 9 aa, Homo Sapiens
YATKERIEY

SEQ ID NO: 169920 - protein, 9 aa, Homo Sapiens
YATKHLRVL

SEQ ID NO: 169921 - protein, 9 aa, Homo Sapiens
YATLREESL

SEQ ID NO: 169922 - protein, 9 aa, Homo Sapiens
YATLYYREH

SEQ ID NO: 169923 - protein, 9 aa, Homo Sapiens
YATQLQKTY

SEQ ID NO: 169924 - protein, 9 aa, Homo Sapiens
YAVDRAITH

SEQ ID NO: 169925 - protein, 9 aa, Homo Sapiens
YAVLDIREF

SEQ ID NO: 169926 - protein, 9 aa, Homo Sapiens
YAVNSKRML

SEQ ID NO: 169927 - protein, 9 aa, Homo Sapiens
YAVNSQFTM

SEQ ID NO: 169928 - protein, 9 aa, Homo Sapiens
YAVQRNYGF

SEQ ID NO: 169929 - protein, 9 aa, Homo Sapiens
YAYEKPHVV

SEQ ID NO: 169930 - protein, 9 aa, Homo Sapiens
YAYLYIRML

SEQ ID NO: 169931 - protein, 9 aa, Homo Sapiens
YAYPGVLLI

SEQ ID NO: 169932 - protein, 9 aa, Homo Sapiens
YAYPYSYYY

SEQ ID NO: 169933 - protein, 9 aa, Homo Sapiens
YAYTGRLEL

SEQ ID NO: 169934 - protein, 9 aa, Homo Sapiens
YCSNLVRTL

SEQ ID NO: 169935 - protein, 9 aa, Homo Sapiens
YFAFRNFLY

SEQ ID NO: 169936 - protein, 9 aa, Homo Sapiens
YFFKRTQYF

SEQ ID NO: 169937 - protein, 9 aa, Homo Sapiens
YFGLRTEEM

SEQ ID NO: 169938 - protein, 9 aa, Homo Sapiens
YFHDATRVY

SEQ ID NO: 169939 - protein, 9 aa, Homo Sapiens
YFHDRFLEL

SEQ ID NO: 169940 - protein, 9 aa, Homo Sapiens
YFHDRVASF

SEQ ID NO: 169941 - protein, 9 aa, Homo Sapiens
YFINRSWEW

SEQ ID NO: 169942 - protein, 9 aa, Homo Sapiens
YFLLRPETL

SEQ ID NO: 169943 - protein, 9 aa, Homo Sapiens
YFLNRKLVY

SEQ ID NO: 169944 - protein, 9 aa, Homo Sapiens
YFQHREFSF

SEQ ID NO: 169945 - protein, 9 aa, Homo Sapiens
YFVDDRLVM

SEQ ID NO: 169946 - protein, 9 aa, Homo Sapiens
YFVMTRQEY

SEQ ID NO: 169947 - protein, 9 aa, Homo Sapiens
YGADALRLY

SEQ ID NO: 169948 - protein, 9 aa, Homo Sapiens
YGAEIRPSL

SEQ ID NO: 169949 - protein, 9 aa, Homo Sapiens
YGIDTIRLY

SEQ ID NO: 169950 - protein, 9 aa, Homo Sapiens
YGKIAVMEL

SEQ ID NO: 169951 - protein, 9 aa, Homo Sapiens
YGLEKFWAF

SEQ ID NO: 169952 - protein, 9 aa, Homo Sapiens
YGMDSRPPM

SEQ ID NO: 169953 - protein, 9 aa, Homo Sapiens
YGNERFIQY

SEQ ID NO: 169954 - protein, 9 aa, Homo Sapiens
YGPPVRTEY

SEQ ID NO: 169955 - protein, 9 aa, Homo Sapiens
YGQFRVVSW

SEQ ID NO: 169956 - protein, 9 aa, Homo Sapiens
YGQWKNETY

SEQ ID NO: 169957 - protein, 9 aa, Homo Sapiens
YGSEGRFTF

SEQ ID NO: 169958 - protein, 9 aa, Homo Sapiens
YGTIKIGTY

SEQ ID NO: 169959 - protein, 9 aa, Homo Sapiens
YGYDNVKEY

SEQ ID NO: 169960 - protein, 9 aa, Homo Sapiens
YGYNQRPPY

SEQ ID NO: 169961 - protein, 9 aa, Homo Sapiens
YIIDFGLAK

SEQ ID NO: 169962 - protein, 9 aa, Homo Sapiens
YIIDTTGKL

SEQ ID NO: 169963 - protein, 9 aa, Homo Sapiens
YIIGVFRKF

SEQ ID NO: 169964 - protein, 9 aa, Homo Sapiens
YIMDWMDEM

SEQ ID NO: 169965 - protein, 9 aa, Homo Sapiens
YIRDLALEY

SEQ ID NO: 169966 - protein, 9 aa, Homo Sapiens
YISAKPLEM

SEQ ID NO: 169967 - protein, 9 aa, Homo Sapiens
YISFRHHVY

SEQ ID NO: 169968 - protein, 9 aa, Homo Sapiens
YISGLPRTM

SEQ ID NO: 169969 - protein, 9 aa, Homo Sapiens
YITFVKPAF

SEQ ID NO: 169970 - protein, 9 aa, Homo Sapiens
YITSVSRLY

SEQ ID NO: 169971 - protein, 9 aa, Homo Sapiens
YIYIRGEFY

SEQ ID NO: 169972 - protein, 9 aa, Homo Sapiens
YLKPYFLEA

SEQ ID NO: 169973 - protein, 9 aa, Homo Sapiens
YLKQDPLEM

SEQ ID NO: 169974 - protein, 9 aa, Homo Sapiens
YLPYRDYNY

SEQ ID NO: 169975 - protein, 9 aa, Homo Sapiens
YLRPPNTSL

SEQ ID NO: 169976 - protein, 9 aa, Homo Sapiens
YLYLRGLVY

SEQ ID NO: 169977 - protein, 9 aa, Homo Sapiens
YMADRLLSF

SEQ ID NO: 169978 - protein, 9 aa, Homo Sapiens
YMDYRGYSY

SEQ ID NO: 169979 - protein, 9 aa, Homo Sapiens
YMGIRNESF

SEQ ID NO: 169980 - protein, 9 aa, Homo Sapiens
YMREPILDL

SEQ ID NO: 169981 - protein, 9 aa, Homo Sapiens
YNFEKPVVM

SEQ ID NO: 169982 - protein, 9 aa, Homo Sapiens
YNYYKKFSY

SEQ ID NO: 169983 - protein, 9 aa, Homo Sapiens
YQADIERMY

SEQ ID NO: 169984 - protein, 9 aa, Homo Sapiens
YQILRGLAY

SEQ ID NO: 169985 - protein, 9 aa, Homo Sapiens
YQQELEREL

SEQ ID NO: 169986 - protein, 9 aa, Homo Sapiens
YQRDYSLIM

SEQ ID NO: 169987 - protein, 9 aa, Homo Sapiens
YQTPFNKEV

SEQ ID NO: 169988 - protein, 9 aa, Homo Sapiens
YSAAKSWVF

SEQ ID NO: 169989 - protein, 9 aa, Homo Sapiens
YSAEPLPEL

SEQ ID NO: 169990 - protein, 9 aa, Homo Sapiens
YSALREIAF

SEQ ID NO: 169991 - protein, 9 aa, Homo Sapiens
YSALSHPYF

SEQ ID NO: 169992 - protein, 9 aa, Homo Sapiens
YSAPVIHVL

SEQ ID NO: 169993 - protein, 9 aa, Homo Sapiens
YSAVRPFGC

SEQ ID NO: 169994 - protein, 9 aa, Homo Sapiens
YSFHKFHYL

SEQ ID NO: 169995 - protein, 9 aa, Homo Sapiens
YSFTHIVPY

SEQ ID NO: 169996 - protein, 9 aa, Homo Sapiens
YSFYLPIAA

SEQ ID NO: 169997 - protein, 9 aa, Homo Sapiens
YSGLRVQAM

SEQ ID NO: 169998 - protein, 9 aa, Homo Sapiens
YSHPHVRLL

SEQ ID NO: 169999 - protein, 9 aa, Homo Sapiens
YSISERLEM

SEQ ID NO: 170000 - protein, 9 aa, Homo Sapiens
YSISRKYDY

SEQ ID NO: 170001 - protein, 9 aa, Homo Sapiens
YSIYVYKVL

SEQ ID NO: 170002 - protein, 9 aa, Homo Sapiens
YSKLPGVSL

SEQ ID NO: 170003 - protein, 9 aa, Homo Sapiens
YSLNKIHAY

SEQ ID NO: 170004 - protein, 9 aa, Homo Sapiens
YSMPISIEF

SEQ ID NO: 170005 - protein, 9 aa, Homo Sapiens
YSMPSTHAM

SEQ ID NO: 170006 - protein, 9 aa, Homo Sapiens
YSMPVHAAV

SEQ ID NO: 170007 - protein, 9 aa, Homo Sapiens
YSMYREFWA

SEQ ID NO: 170008 - protein, 9 aa, Homo Sapiens
YSNTRAYYF

SEQ ID NO: 170009 - protein, 9 aa, Homo Sapiens
YSQEQRQAF

SEQ ID NO: 170010 - protein, 9 aa, Homo Sapiens
YSQERVNCF

SEQ ID NO: 170011 - protein, 9 aa, Homo Sapiens
YSSDFRQIF

SEQ ID NO: 170012 - protein, 9 aa, Homo Sapiens
YSSFSRFIM

SEQ ID NO: 170013 - protein, 9 aa, Homo Sapiens
YSSGLVRLY

SEQ ID NO: 170014 - protein, 9 aa, Homo Sapiens
YSSKLYRFF

SEQ ID NO: 170015 - protein, 9 aa, Homo Sapiens
YSSLRVVGV

SEQ ID NO: 170016 - protein, 9 aa, Homo Sapiens
YSSLSRFLM

SEQ ID NO: 170017 - protein, 9 aa, Homo Sapiens
YSSPLFRSL

SEQ ID NO: 170018 - protein, 9 aa, Homo Sapiens
YSSPYPQEY

SEQ ID NO: 170019 - protein, 9 aa, Homo Sapiens
YSTAPRPSL

SEQ ID NO: 170020 - protein, 9 aa, Homo Sapiens
YSTELKKLY

SEQ ID NO: 170021 - protein, 9 aa, Homo Sapiens
YSTIRKQEY

SEQ ID NO: 170022 - protein, 9 aa, Homo Sapiens
YSTKLYRFF

SEQ ID NO: 170023 - protein, 9 aa, Homo Sapiens
YSTPHAFTF

SEQ ID NO: 170024 - protein, 9 aa, Homo Sapiens
YSYFEKETL

SEQ ID NO: 170025 - protein, 9 aa, Homo Sapiens
YSYFSPRTM

SEQ ID NO: 170026 - protein, 9 aa, Homo Sapiens
YSYVRPERL

SEQ ID NO: 170027 - protein, 9 aa, Homo Sapiens
YTAVVPLVY

SEQ ID NO: 170028 - protein, 9 aa, Homo Sapiens
YTIENPRHF

SEQ ID NO: 170029 - protein, 9 aa, Homo Sapiens
YTKPLVLEI

SEQ ID NO: 170030 - protein, 9 aa, Homo Sapiens
YTLINHRVL

SEQ ID NO: 170031 - protein, 9 aa, Homo Sapiens
YTLMHKAHT

SEQ ID NO: 170032 - protein, 9 aa, Homo Sapiens
YTMPNFRQY

SEQ ID NO: 170033 - protein, 9 aa, Homo Sapiens
YTMVYWHAL

SEQ ID NO: 170034 - protein, 9 aa, Homo Sapiens
YTRPGLPTL

SEQ ID NO: 170035 - protein, 9 aa, Homo Sapiens
YTRQQVLEL

SEQ ID NO: 170036 - protein, 9 aa, Homo Sapiens
YTRYQTLEL

SEQ ID NO: 170037 - protein, 9 aa, Homo Sapiens
YTSDYFISY

SEQ ID NO: 170038 - protein, 9 aa, Homo Sapiens
YTSGDVRVW

SEQ ID NO: 170039 - protein, 9 aa, Homo Sapiens
YTSGTFRTV

SEQ ID NO: 170040 - protein, 9 aa, Homo Sapiens
YTSSEIRVF

SEQ ID NO: 170041 - protein, 9 aa, Homo Sapiens
YTTDFIYQL

SEQ ID NO: 170042 - protein, 9 aa, Homo Sapiens
YTTDRVMTV

SEQ ID NO: 170043 - protein, 9 aa, Homo Sapiens
YTTFVKPAF

SEQ ID NO: 170044 - protein, 9 aa, Homo Sapiens
YTVDGFRYF

SEQ ID NO: 170045 - protein, 9 aa, Homo Sapiens
YTYLRINFY

SEQ ID NO: 170046 - protein, 9 aa, Homo Sapiens
YVHELSLEM

SEQ ID NO: 170047 - protein, 9 aa, Homo Sapiens
YVIVRAYQY

SEQ ID NO: 170048 - protein, 9 aa, Homo Sapiens
YVKDIYQYL

SEQ ID NO: 170049 - protein, 9 aa, Homo Sapiens
YVQDFHPRL

SEQ ID NO: 170050 - protein, 9 aa, Homo Sapiens
YVSDITRTW

SEQ ID NO: 170051 - protein, 9 aa, Homo Sapiens
YVSDLGKVF

SEQ ID NO: 170052 - protein, 9 aa, Homo Sapiens
YVSPRILTA

SEQ ID NO: 170053 - protein, 9 aa, Homo Sapiens
YVTSLLKMY

SEQ ID NO: 170054 - protein, 9 aa, Homo Sapiens
YVTSVILHI

SEQ ID NO: 170055 - protein, 9 aa, Homo Sapiens
YVTTSTRTY

SEQ ID NO: 170056 - protein, 9 aa, Homo Sapiens
YVVEPYRKY

SEQ ID NO: 170057 - protein, 9 aa, Homo Sapiens
YYHARVYEF

SEQ ID NO: 170058 - protein, 10 aa, Homo Sapiens
AAAISHGRVF

SEQ ID NO: 170059 - protein, 10 aa, Homo Sapiens
AAAQKAVSAL

SEQ ID NO: 170060 - protein, 10 aa, Homo Sapiens
AAIDPRVQYL

SEQ ID NO: 170061 - protein, 10 aa, Homo Sapiens
AAINPELLQL

SEQ ID NO: 170062 - protein, 10 aa, Homo Sapiens
AAKMMSTAAI

SEQ ID NO: 170063 - protein, 10 aa, Homo Sapiens
AAMAKAFSTL

SEQ ID NO: 170064 - protein, 10 aa, Homo Sapiens
AASQHVFRFY

SEQ ID NO: 170065 - protein, 10 aa, Homo Sapiens
AAVAVGHRVY

SEQ ID NO: 170066 - protein, 10 aa, Homo Sapiens
AAVDFFRPSA

SEQ ID NO: 170067 - protein, 10 aa, Homo Sapiens
AFALAGNQDK

SEQ ID NO: 170068 - protein, 10 aa, Homo Sapiens
AGILENGAVR

SEQ ID NO: 170069 - protein, 10 aa, Homo Sapiens
AGSTVMVIHA

SEQ ID NO: 170070 - protein, 10 aa, Homo Sapiens
ALPEDDFLSL

SEQ ID NO: 170071 - protein, 10 aa, Homo Sapiens
ATPAGDIMEL

SEQ ID NO: 170072 - protein, 10 aa, Homo Sapiens
AVTDALVWVI

SEQ ID NO: 170073 - protein, 10 aa, Homo Sapiens
AWRRRAALGL

SEQ ID NO: 170074 - protein, 10 aa, Homo Sapiens
CAFYDPTHAW

SEQ ID NO: 170075 - protein, 10 aa, Homo Sapiens
DEPPQSPWDR

SEQ ID NO: 170076 - protein, 10 aa, Homo Sapiens
DEYGRPFLII

SEQ ID NO: 170077 - protein, 10 aa, Homo Sapiens
EALPLAFTQK

SEQ ID NO: 170078 - protein, 10 aa, Homo Sapiens
EFNAETFTFH

SEQ ID NO: 170079 - protein, 10 aa, Homo Sapiens
FAAQGEPKVY

SEQ ID NO: 170080 - protein, 10 aa, Homo Sapiens
FAFESDLHSL

SEQ ID NO: 170081 - protein, 10 aa, Homo Sapiens
FAFSPDGRHL

SEQ ID NO: 170082 - protein, 10 aa, Homo Sapiens
FAGDRDQYIL

SEQ ID NO: 170083 - protein, 10 aa, Homo Sapiens
FAIDLNGKKY

SEQ ID NO: 170084 - protein, 10 aa, Homo Sapiens
FAIGGIARTY

SEQ ID NO: 170085 - protein, 10 aa, Homo Sapiens
FAKLPNLLQL

SEQ ID NO: 170086 - protein, 10 aa, Homo Sapiens
FALTNGIYPH

SEQ ID NO: 170087 - protein, 10 aa, Homo Sapiens
FAMDVYKNLY

SEQ ID NO: 170088 - protein, 10 aa, Homo Sapiens
FANDLKPKVY

SEQ ID NO: 170089 - protein, 10 aa, Homo Sapiens
FAQDVGRMFK

SEQ ID NO: 170090 - protein, 10 aa, Homo Sapiens
FAQETFGKQY

SEQ ID NO: 170091 - protein, 10 aa, Homo Sapiens
FASLAEGRLY

SEQ ID NO: 170092 - protein, 10 aa, Homo Sapiens
FASYMEQHLM

SEQ ID NO: 170093 - protein, 10 aa, Homo Sapiens
FATLVSDRFL

SEQ ID NO: 170094 - protein, 10 aa, Homo Sapiens
FAVDLEHHSY

SEQ ID NO: 170095 - protein, 10 aa, Homo Sapiens
FAVDPRFLAY

SEQ ID NO: 170096 - protein, 10 aa, Homo Sapiens
FAVEAENREM

SEQ ID NO: 170097 - protein, 10 aa, Homo Sapiens
FAVGVGRPSF

SEQ ID NO: 170098 - protein, 10 aa, Homo Sapiens
FAVNPLLRVI

SEQ ID NO: 170099 - protein, 10 aa, Homo Sapiens
FAVSAVVHEY

SEQ ID NO: 170100 - protein, 10 aa, Homo Sapiens
FAVTVEGKVY

SEQ ID NO: 170101 - protein, 10 aa, Homo Sapiens
FAYDPSNYEY

SEQ ID NO: 170102 - protein, 10 aa, Homo Sapiens
FAYGGHPYPF

SEQ ID NO: 170103 - protein, 10 aa, Homo Sapiens
FFLDHVRTSF

SEQ ID NO: 170104 - protein, 10 aa, Homo Sapiens
FFTDAERRSV

SEQ ID NO: 170105 - protein, 10 aa, Homo Sapiens
FFYNLIHPEY

SEQ ID NO: 170106 - protein, 10 aa, Homo Sapiens
FGSAAPPRQF

SEQ ID NO: 170107 - protein, 10 aa, Homo Sapiens
FLPARFYQAL

SEQ ID NO: 170108 - protein, 10 aa, Homo Sapiens
FLTDAKRPAL

SEQ ID NO: 170109 - protein, 10 aa, Homo Sapiens
FMSRTNRPPL

SEQ ID NO: 170110 - protein, 10 aa, Homo Sapiens
FSAPSALRVY

SEQ ID NO: 170111 - protein, 10 aa, Homo Sapiens
FSLGSKGFYY

SEQ ID NO: 170112 - protein, 10 aa, Homo Sapiens
FTLDPLYREL

SEQ ID NO: 170113 - protein, 10 aa, Homo Sapiens
FTPFVDPRVY

SEQ ID NO: 170114 - protein, 10 aa, Homo Sapiens
FTSEPRLIVI

SEQ ID NO: 170115 - protein, 10 aa, Homo Sapiens
FTTDLFGRDL

SEQ ID NO: 170116 - protein, 10 aa, Homo Sapiens
FTVETASREY

SEQ ID NO: 170117 - protein, 10 aa, Homo Sapiens
FVNDIFERIA

SEQ ID NO: 170118 - protein, 10 aa, Homo Sapiens
GEKVVEIVKK

SEQ ID NO: 170119 - protein, 10 aa, Homo Sapiens
GGYDGYRPSF

SEQ ID NO: 170120 - protein, 10 aa, Homo Sapiens
GIPTHHPRVY

SEQ ID NO: 170121 - protein, 10 aa, Homo Sapiens
HAKDPNNLFM

SEQ ID NO: 170122 - protein, 10 aa, Homo Sapiens
HDNEETFLKK

SEQ ID NO: 170123 - protein, 10 aa, Homo Sapiens
HIPDHLRPEY

SEQ ID NO: 170124 - protein, 10 aa, Homo Sapiens
IATPFIKLFQ

SEQ ID NO: 170125 - protein, 10 aa, Homo Sapiens
IATPGRLIDF

SEQ ID NO: 170126 - protein, 10 aa, Homo Sapiens
IATSQNRIYL

SEQ ID NO: 170127 - protein, 10 aa, Homo Sapiens
IAVDTAGRVL

SEQ ID NO: 170128 - protein, 10 aa, Homo Sapiens
ISIEGNKMPL

SEQ ID NO: 170129 - protein, 10 aa, Homo Sapiens
IVSPYTSRIL

SEQ ID NO: 170130 - protein, 10 aa, Homo Sapiens
KAIEYVHGYF

SEQ ID NO: 170131 - protein, 10 aa, Homo Sapiens
KAKWPDRITL

SEQ ID NO: 170132 - protein, 10 aa, Homo Sapiens
KATAYILSVQ

SEQ ID NO: 170133 - protein, 10 aa, Homo Sapiens
KATNVVRLLL

SEQ ID NO: 170134 - protein, 10 aa, Homo Sapiens
KAVPPSKRFL

SEQ ID NO: 170135 - protein, 10 aa, Homo Sapiens
KISPWTGRFY

SEQ ID NO: 170136 - protein, 10 aa, Homo Sapiens
KVPQLEIVPN

SEQ ID NO: 170137 - protein, 10 aa, Homo Sapiens
LAAESNFRIY

SEQ ID NO: 170138 - protein, 10 aa, Homo Sapiens
LAAPGHPPVL

SEQ ID NO: 170139 - protein, 10 aa, Homo Sapiens
LAEFAFSLYR

SEQ ID NO: 170140 - protein, 10 aa, Homo Sapiens
LAIDKRFRVF

SEQ ID NO: 170141 - protein, 10 aa, Homo Sapiens
LAVEPKTETY

SEQ ID NO: 170142 - protein, 10 aa, Homo Sapiens
LETPDFQLFK

SEQ ID NO: 170143 - protein, 10 aa, Homo Sapiens
LLFYETSASF

SEQ ID NO: 170144 - protein, 10 aa, Homo Sapiens
LPLAGIRSAL

SEQ ID NO: 170145 - protein, 10 aa, Homo Sapiens
LSAFLPARFY

SEQ ID NO: 170146 - protein, 10 aa, Homo Sapiens
LSKDPDPIPL

SEQ ID NO: 170147 - protein, 10 aa, Homo Sapiens
LSQDSFYRVL

SEQ ID NO: 170148 - protein, 10 aa, Homo Sapiens
LVAASQAALG

SEQ ID NO: 170149 - protein, 10 aa, Homo Sapiens
LWLESVRLEY

SEQ ID NO: 170150 - protein, 10 aa, Homo Sapiens
MATPTPGHIM

SEQ ID NO: 170151 - protein, 10 aa, Homo Sapiens
MAYGASFLSF

SEQ ID NO: 170152 - protein, 10 aa, Homo Sapiens
MIKEGDYNPL

SEQ ID NO: 170153 - protein, 10 aa, Homo Sapiens
NAADIENRVL

SEQ ID NO: 170154 - protein, 10 aa, Homo Sapiens
NAADWHNLIL

SEQ ID NO: 170155 - protein, 10 aa, Homo Sapiens
NATLNNMRVY

SEQ ID NO: 170156 - protein, 10 aa, Homo Sapiens
NNATKTFREF

SEQ ID NO: 170157 - protein, 10 aa, Homo Sapiens
QAINPKLLQL

SEQ ID NO: 170158 - protein, 10 aa, Homo Sapiens
QAINPKLMQL

SEQ ID NO: 170159 - protein, 10 aa, Homo Sapiens
QSVQSIRPPY

SEQ ID NO: 170160 - protein, 10 aa, Homo Sapiens
RAFGIPIRVY

SEQ ID NO: 170161 - protein, 10 aa, Homo Sapiens
RASMDPKRFY

SEQ ID NO: 170162 - protein, 10 aa, Homo Sapiens
RAVEPGRPPL

SEQ ID NO: 170163 - protein, 10 aa, Homo Sapiens
RFVEVGRVAY

SEQ ID NO: 170164 - protein, 10 aa, Homo Sapiens
RSNFGYNIPL

SEQ ID NO: 170165 - protein, 10 aa, Homo Sapiens
RTTTWTRPIM

SEQ ID NO: 170166 - protein, 10 aa, Homo Sapiens
SAADPQIRQF

SEQ ID NO: 170167 - protein, 10 aa, Homo Sapiens
SAAYIPAHTY

SEQ ID NO: 170168 - protein, 10 aa, Homo Sapiens
SAKDFIDLTL

SEQ ID NO: 170169 - protein, 10 aa, Homo Sapiens
SAMPRDILIV

SEQ ID NO: 170170 - protein, 10 aa, Homo Sapiens
SAMQGWRVSM

SEQ ID NO: 170171 - protein, 10 aa, Homo Sapiens
SAMSRYILIM

SEQ ID NO: 170172 - protein, 10 aa, Homo Sapiens
SAPGYLPTSL

SEQ ID NO: 170173 - protein, 10 aa, Homo Sapiens
SATDAAIRVW

SEQ ID NO: 170174 - protein, 10 aa, Homo Sapiens
SGNTFRPEVH

SEQ ID NO: 170175 - protein, 10 aa, Homo Sapiens
SITHVFSLNK

SEQ ID NO: 170176 - protein, 10 aa, Homo Sapiens
SIVHPSYNSN

SEQ ID NO: 170177 - protein, 10 aa, Homo Sapiens
SLPAIVRPEF

SEQ ID NO: 170178 - protein, 10 aa, Homo Sapiens
SLSTMFRVEY

SEQ ID NO: 170179 - protein, 10 aa, Homo Sapiens
SSFDLLPREF

SEQ ID NO: 170180 - protein, 10 aa, Homo Sapiens
STFSPDGRVF

SEQ ID NO: 170181 - protein, 10 aa, Homo Sapiens
SVMHEALHNR

SEQ ID NO: 170182 - protein, 10 aa, Homo Sapiens
SVPDSTWRIM

SEQ ID NO: 170183 - protein, 10 aa, Homo Sapiens
TIFSPEGRLY

SEQ ID NO: 170184 - protein, 10 aa, Homo Sapiens
VAAMPRPVSY

SEQ ID NO: 170185 - protein, 10 aa, Homo Sapiens
VAFDRHLYVF

SEQ ID NO: 170186 - protein, 10 aa, Homo Sapiens
VAFSPDGRYL

SEQ ID NO: 170187 - protein, 10 aa, Homo Sapiens
VAIESTPMIL

SEQ ID NO: 170188 - protein, 10 aa, Homo Sapiens
VAIKGAFKVY

SEQ ID NO: 170189 - protein, 10 aa, Homo Sapiens
VALHQPLISF

SEQ ID NO: 170190 - protein, 10 aa, Homo Sapiens
VASDFYLRYY

SEQ ID NO: 170191 - protein, 10 aa, Homo Sapiens
VASEALARVV

SEQ ID NO: 170192 - protein, 10 aa, Homo Sapiens
VATNLLKLFL

SEQ ID NO: 170193 - protein, 10 aa, Homo Sapiens
VAVDPSGRLL

SEQ ID NO: 170194 - protein, 10 aa, Homo Sapiens
VAVGHRVYSF

SEQ ID NO: 170195 - protein, 10 aa, Homo Sapiens
VDGVEVHNAK

SEQ ID NO: 170196 - protein, 10 aa, Homo Sapiens
VFLMIEQNTK

SEQ ID NO: 170197 - protein, 10 aa, Homo Sapiens
VFTDVKRPGY

SEQ ID NO: 170198 - protein, 10 aa, Homo Sapiens
VGAETKTLPS

SEQ ID NO: 170199 - protein, 10 aa, Homo Sapiens
VLPTLPFHVL

SEQ ID NO: 170200 - protein, 10 aa, Homo Sapiens
VSAAPRTVAL

SEQ ID NO: 170201 - protein, 10 aa, Homo Sapiens
VTSTSLTIKS

SEQ ID NO: 170202 - protein, 10 aa, Homo Sapiens
VTSYDPLRIY

SEQ ID NO: 170203 - protein, 10 aa, Homo Sapiens
VVPPFLQPEV

SEQ ID NO: 170204 - protein, 10 aa, Homo Sapiens
WIASHTTEER

SEQ ID NO: 170205 - protein, 10 aa, Homo Sapiens
YAAEFHARFV

SEQ ID NO: 170206 - protein, 10 aa, Homo Sapiens
YAANPRPDAL

SEQ ID NO: 170207 - protein, 10 aa, Homo Sapiens
YAAVPLYRLY

SEQ ID NO: 170208 - protein, 10 aa, Homo Sapiens
YAFDKYRDQY

SEQ ID NO: 170209 - protein, 10 aa, Homo Sapiens
YAFNGTQRFL

SEQ ID NO: 170210 - protein, 10 aa, Homo Sapiens
YAFQTEGKLY

SEQ ID NO: 170211 - protein, 10 aa, Homo Sapiens
YAKIYPDPEL

SEQ ID NO: 170212 - protein, 10 aa, Homo Sapiens
YAKNFQPFAL

SEQ ID NO: 170213 - protein, 10 aa, Homo Sapiens
YASPAKLESI

SEQ ID NO: 170214 - protein, 10 aa, Homo Sapiens
YATTVIPRVY

SEQ ID NO: 170215 - protein, 10 aa, Homo Sapiens
YAVDAYFREA

SEQ ID NO: 170216 - protein, 10 aa, Homo Sapiens
YAVEGRDLTL

SEQ ID NO: 170217 - protein, 10 aa, Homo Sapiens
YGAEALERMF

SEQ ID NO: 170218 - protein, 10 aa, Homo Sapiens
YIAPWSGRFY

SEQ ID NO: 170219 - protein, 10 aa, Homo Sapiens
YITFIEGRSY

SEQ ID NO: 170220 - protein, 10 aa, Homo Sapiens
YITPFIRPVM

SEQ ID NO: 170221 - protein, 10 aa, Homo Sapiens
YMIDPSGVSY

SEQ ID NO: 170222 - protein, 10 aa, Homo Sapiens
YSQEADDRVF

SEQ ID NO: 170223 - protein, 10 aa, Homo Sapiens
YSSAFTNRIF

SEQ ID NO: 170224 - protein, 10 aa, Homo Sapiens
YTLIGASGQR

SEQ ID NO: 170225 - protein, 10 aa, Homo Sapiens
YVADPVYRTF

SEQ ID NO: 170226 - protein, 10 aa, Homo Sapiens
YVGGQEHFAH

SEQ ID NO: 170227 - protein, 10 aa, Homo Sapiens
YVPAEPKLAF

SEQ ID NO: 170228 - protein, 10 aa, Homo Sapiens
YVPDQPHPEI

SEQ ID NO: 170229 - protein, 10 aa, Homo Sapiens
YVTAIEDRQY

SEQ ID NO: 170230 - protein, 10 aa, Homo Sapiens
YVTDVLYRVM

SEQ ID NO: 170231 - protein, 11 aa, Homo Sapiens
AAIDWFDGKEF

SEQ ID NO: 170232 - protein, 11 aa, Homo Sapiens
AALPDASPGNL

SEQ ID NO: 170233 - protein, 11 aa, Homo Sapiens
AAMASLGALAL

SEQ ID NO: 170234 - protein, 11 aa, Homo Sapiens
AARQPIELLSM

SEQ ID NO: 170235 - protein, 11 aa, Homo Sapiens
AASNAKLALFY

SEQ ID NO: 170236 - protein, 11 aa, Homo Sapiens
AASPNAEIHIL

SEQ ID NO: 170237 - protein, 11 aa, Homo Sapiens
AAVIGDVIRVY

SEQ ID NO: 170238 - protein, 11 aa, Homo Sapiens
AAVPEIMDRIY

SEQ ID NO: 170239 - protein, 11 aa, Homo Sapiens
ADREDDPNFFK

SEQ ID NO: 170240 - protein, 11 aa, Homo Sapiens
AFALAGNQDKR

SEQ ID NO: 170241 - protein, 11 aa, Homo Sapiens
AFHDNEETFLK

SEQ ID NO: 170242 - protein, 11 aa, Homo Sapiens
ALEVDETYVPK

SEQ ID NO: 170243 - protein, 11 aa, Homo Sapiens
APPPLPPVYSM

SEQ ID NO: 170244 - protein, 11 aa, Homo Sapiens
ASDGFKANLVF

SEQ ID NO: 170245 - protein, 11 aa, Homo Sapiens
DVINGSPISQK

SEQ ID NO: 170246 - protein, 11 aa, Homo Sapiens
EERAAPFSLEY

SEQ ID NO: 170247 - protein, 11 aa, Homo Sapiens
FAFEGIGDEDL

SEQ ID NO: 170248 - protein, 11 aa, Homo Sapiens
FAKPVYPGQTL

SEQ ID NO: 170249 - protein, 11 aa, Homo Sapiens
FALPSELERSY

SEQ ID NO: 170250 - protein, 11 aa, Homo Sapiens
FAQEAISVLAL

SEQ ID NO: 170251 - protein, 11 aa, Homo Sapiens
FAQEALTVLSL

SEQ ID NO: 170252 - protein, 11 aa, Homo Sapiens
FASKEIAENAL

SEQ ID NO: 170253 - protein, 11 aa, Homo Sapiens
FAVDNVGNRTL

SEQ ID NO: 170254 - protein, 11 aa, Homo Sapiens
FAYDGKDYLTL

SEQ ID NO: 170255 - protein, 11 aa, Homo Sapiens
FFSDARELESF

SEQ ID NO: 170256 - protein, 11 aa, Homo Sapiens
FNWYVDGVEVH

SEQ ID NO: 170257 - protein, 11 aa, Homo Sapiens
FSIDVGYERFL

SEQ ID NO: 170258 - protein, 11 aa, Homo Sapiens
FSSDKHAQLIL

SEQ ID NO: 170259 - protein, 11 aa, Homo Sapiens
FTSSMRGMDAV

SEQ ID NO: 170260 - protein, 11 aa, Homo Sapiens
FVAEPDNKNVY

SEQ ID NO: 170261 - protein, 11 aa, Homo Sapiens
FVAESHIILVL

SEQ ID NO: 170262 - protein, 11 aa, Homo Sapiens
GATNVGSIRIY

SEQ ID NO: 170263 - protein, 11 aa, Homo Sapiens
IASDGLKGRVF

SEQ ID NO: 170264 - protein, 11 aa, Homo Sapiens
IATPGRLIDFL

SEQ ID NO: 170265 - protein, 11 aa, Homo Sapiens
ISDPYKVYRIV

SEQ ID NO: 170266 - protein, 11 aa, Homo Sapiens
ITSSAKVDMTF

SEQ ID NO: 170267 - protein, 11 aa, Homo Sapiens
KASVMRLTISY

SEQ ID NO: 170268 - protein, 11 aa, Homo Sapiens
KATNVVRLLLG

SEQ ID NO: 170269 - protein, 11 aa, Homo Sapiens
KILTERGYSFT

SEQ ID NO: 170270 - protein, 11 aa, Homo Sapiens
KIREEYPDRIM

SEQ ID NO: 170271 - protein, 11 aa, Homo Sapiens
KLVAASQAALG

SEQ ID NO: 170272 - protein, 11 aa, Homo Sapiens
KLVNEVTEFAK

SEQ ID NO: 170273 - protein, 11 aa, Homo Sapiens
LALDPSLVPTF

SEQ ID NO: 170274 - protein, 11 aa, Homo Sapiens
LGEFVSETESR

SEQ ID NO: 170275 - protein, 11 aa, Homo Sapiens
LLSAARLLTSF

SEQ ID NO: 170276 - protein, 11 aa, Homo Sapiens
LSVAPSKAREY

SEQ ID NO: 170277 - protein, 11 aa, Homo Sapiens
LSVEIYDRREY

SEQ ID NO: 170278 - protein, 11 aa, Homo Sapiens
MAAEAAALRVY

SEQ ID NO: 170279 - protein, 11 aa, Homo Sapiens
MAPSETQFSHL

SEQ ID NO: 170280 - protein, 11 aa, Homo Sapiens
MAVEDEGLRVF

SEQ ID NO: 170281 - protein, 11 aa, Homo Sapiens
NTSEPQHLLVM

SEQ ID NO: 170282 - protein, 11 aa, Homo Sapiens
QAIEPDVLRQF

SEQ ID NO: 170283 - protein, 11 aa, Homo Sapiens
QVTHEGSTVEK

SEQ ID NO: 170284 - protein, 11 aa, Homo Sapiens
RVRPGETLLIH

SEQ ID NO: 170285 - protein, 11 aa, Homo Sapiens
SAAEVGFVRFF

SEQ ID NO: 170286 - protein, 11 aa, Homo Sapiens
SAFVPSSGRIY

SEQ ID NO: 170287 - protein, 11 aa, Homo Sapiens
SAINEVVTREY

SEQ ID NO: 170288 - protein, 11 aa, Homo Sapiens
SASDVHGNFAF

SEQ ID NO: 170289 - protein, 11 aa, Homo Sapiens
SAYDGKDYIAL

SEQ ID NO: 170290 - protein, 11 aa, Homo Sapiens
SITTDFIPSFR

SEQ ID NO: 170291 - protein, 11 aa, Homo Sapiens
SLSQARLLTSF

SEQ ID NO: 170292 - protein, 11 aa, Homo Sapiens
TTTEVNMARVY

SEQ ID NO: 170293 - protein, 11 aa, Homo Sapiens
TVLHQDWLNGK

SEQ ID NO: 170294 - protein, 11 aa, Homo Sapiens
TVVLPLDERAF

SEQ ID NO: 170295 - protein, 11 aa, Homo Sapiens
VAAAISHGRVF

SEQ ID NO: 170296 - protein, 11 aa, Homo Sapiens
VAAPPTAVGSL

SEQ ID NO: 170297 - protein, 11 aa, Homo Sapiens
VAIRPSSKKTY

SEQ ID NO: 170298 - protein, 11 aa, Homo Sapiens
VARDYESLIDL

SEQ ID NO: 170299 - protein, 11 aa, Homo Sapiens
VASEAKIQQLM

SEQ ID NO: 170300 - protein, 11 aa, Homo Sapiens
VASVAKESIPL

SEQ ID NO: 170301 - protein, 11 aa, Homo Sapiens
VATPHARIIEL

SEQ ID NO: 170302 - protein, 11 aa, Homo Sapiens
VATSFIRTIEL

SEQ ID NO: 170303 - protein, 11 aa, Homo Sapiens
VAVGQLGVRVF

SEQ ID NO: 170304 - protein, 11 aa, Homo Sapiens
VAYWRQAGLSY

SEQ ID NO: 170305 - protein, 11 aa, Homo Sapiens
VSSDVIDQKVY

SEQ ID NO: 170306 - protein, 11 aa, Homo Sapiens
VSTPTLVEVSR

SEQ ID NO: 170307 - protein, 11 aa, Homo Sapiens
YAFDEAFVREV

SEQ ID NO: 170308 - protein, 11 aa, Homo Sapiens
YAISPGLDITF

SEQ ID NO: 170309 - protein, 11 aa, Homo Sapiens
YANMYSSILTM

SEQ ID NO: 170310 - protein, 11 aa, Homo Sapiens
YASTEMSLHAL

SEQ ID NO: 170311 - protein, 11 aa, Homo Sapiens
YAVDAYFREAL

SEQ ID NO: 170312 - protein, 11 aa, Homo Sapiens
YAVPSAGLRLF

SEQ ID NO: 170313 - protein, 11 aa, Homo Sapiens
YAYDGKDYIAL

SEQ ID NO: 170314 - protein, 11 aa, Homo Sapiens
YAYDIEDGKFY

SEQ ID NO: 170315 - protein, 11 aa, Homo Sapiens
YIMEPSIFNTL

SEQ ID NO: 170316 - protein, 11 aa, Homo Sapiens
YSFDSRHKPAF

SEQ ID NO: 170317 - protein, 11 aa, Homo Sapiens
YTTDRVMTVSF

SEQ ID NO: 170318 - protein, 8 aa, Homo Sapiens
AAAAAMNL

SEQ ID NO: 170319 - protein, 8 aa, Homo Sapiens
AAAAPAFL

SEQ ID NO: 170320 - protein, 8 aa, Homo Sapiens
AAACAVFL

SEQ ID NO: 170321 - protein, 8 aa, Homo Sapiens
AAADILQL

SEQ ID NO: 170322 - protein, 8 aa, Homo Sapiens
AAAEAVKL

SEQ ID NO: 170323 - protein, 8 aa, Homo Sapiens
AAAHSVRL

SEQ ID NO: 170324 - protein, 8 aa, Homo Sapiens
AAAIFVII

SEQ ID NO: 170325 - protein, 8 aa, Homo Sapiens
AAAKALRI

SEQ ID NO: 170326 - protein, 8 aa, Homo Sapiens
AAAKHLIL

SEQ ID NO: 170327 - protein, 8 aa, Homo Sapiens
AAANPLAL

SEQ ID NO: 170328 - protein, 8 aa, Homo Sapiens
AAAPAVSL

SEQ ID NO: 170329 - protein, 8 aa, Homo Sapiens
AAAPHLLL

SEQ ID NO: 170330 - protein, 8 aa, Homo Sapiens
AAAPPALI

SEQ ID NO: 170331 - protein, 8 aa, Homo Sapiens
AAAPPLTL

SEQ ID NO: 170332 - protein, 8 aa, Homo Sapiens
AAARDVTL

SEQ ID NO: 170333 - protein, 8 aa, Homo Sapiens
AAASPVHL

SEQ ID NO: 170334 - protein, 8 aa, Homo Sapiens
AAASPVTL

SEQ ID NO: 170335 - protein, 8 aa, Homo Sapiens
AAAWPLLL

SEQ ID NO: 170336 - protein, 8 aa, Homo Sapiens
AAGKEVML

SEQ ID NO: 170337 - protein, 8 aa, Homo Sapiens
AAGLPVCL

SEQ ID NO: 170338 - protein, 8 aa, Homo Sapiens
AAGPPLLL

SEQ ID NO: 170339 - protein, 8 aa, Homo Sapiens
AAGPVGSL

SEQ ID NO: 170340 - protein, 8 aa, Homo Sapiens
AAGSPLSL

SEQ ID NO: 170341 - protein, 8 aa, Homo Sapiens
AAGSPVFL

SEQ ID NO: 170342 - protein, 8 aa, Homo Sapiens
AAHIPLFL

SEQ ID NO: 170343 - protein, 8 aa, Homo Sapiens
AASDFIFL

SEQ ID NO: 170344 - protein, 8 aa, Homo Sapiens
AASEPVVL

SEQ ID NO: 170345 - protein, 8 aa, Homo Sapiens
AASHPLLL

SEQ ID NO: 170346 - protein, 8 aa, Homo Sapiens
AIGPCVSL

SEQ ID NO: 170347 - protein, 8 aa, Homo Sapiens
ALGPILRL

SEQ ID NO: 170348 - protein, 8 aa, Homo Sapiens
AVALPVYL

SEQ ID NO: 170349 - protein, 8 aa, Homo Sapiens
AVGPDLYL

SEQ ID NO: 170350 - protein, 8 aa, Homo Sapiens
ESLIACKA

SEQ ID NO: 170351 - protein, 8 aa, Homo Sapiens
FAAEAIAM

SEQ ID NO: 170352 - protein, 8 aa, Homo Sapiens
FAAEAQKL

SEQ ID NO: 170353 - protein, 8 aa, Homo Sapiens
FAAETLVL

SEQ ID NO: 170354 - protein, 8 aa, Homo Sapiens
FAAGETFL

SEQ ID NO: 170355 - protein, 8 aa, Homo Sapiens
FAAKVLYL

SEQ ID NO: 170356 - protein, 8 aa, Homo Sapiens
FAARPVLL

SEQ ID NO: 170357 - protein, 8 aa, Homo Sapiens
FAAVKLFL

SEQ ID NO: 170358 - protein, 8 aa, Homo Sapiens
FADGVILL

SEQ ID NO: 170359 - protein, 8 aa, Homo Sapiens
FAGKVLRL

SEQ ID NO: 170360 - protein, 8 aa, Homo Sapiens
FAGMPITL

SEQ ID NO: 170361 - protein, 8 aa, Homo Sapiens
FAGPHSTL

SEQ ID NO: 170362 - protein, 8 aa, Homo Sapiens
FAIRPMYL

SEQ ID NO: 170363 - protein, 8 aa, Homo Sapiens
FASADISL

SEQ ID NO: 170364 - protein, 8 aa, Homo Sapiens
FASFPEYL

SEQ ID NO: 170365 - protein, 8 aa, Homo Sapiens
FASGAVEL

SEQ ID NO: 170366 - protein, 8 aa, Homo Sapiens
FASGVVKL

SEQ ID NO: 170367 - protein, 8 aa, Homo Sapiens
FASTILHL

SEQ ID NO: 170368 - protein, 8 aa, Homo Sapiens
FGSKIILL

SEQ ID NO: 170369 - protein, 8 aa, Homo Sapiens
FIGYPITL

SEQ ID NO: 170370 - protein, 8 aa, Homo Sapiens
FITDPVVL

SEQ ID NO: 170371 - protein, 8 aa, Homo Sapiens
FLGGVVHL

SEQ ID NO: 170372 - protein, 8 aa, Homo Sapiens
FLGKPLFL

SEQ ID NO: 170373 - protein, 8 aa, Homo Sapiens
FLGNVLFL

SEQ ID NO: 170374 - protein, 8 aa, Homo Sapiens
FLGPEIFF

SEQ ID NO: 170375 - protein, 8 aa, Homo Sapiens
FLGPIVNL

SEQ ID NO: 170376 - protein, 8 aa, Homo Sapiens
FLSQPILL

SEQ ID NO: 170377 - protein, 8 aa, Homo Sapiens
FSAPKINL

SEQ ID NO: 170378 - protein, 8 aa, Homo Sapiens
FSGPAITL

SEQ ID NO: 170379 - protein, 8 aa, Homo Sapiens
FSSPPVIL

SEQ ID NO: 170380 - protein, 8 aa, Homo Sapiens
FTADPLSL

SEQ ID NO: 170381 - protein, 8 aa, Homo Sapiens
FTAQVIIL

SEQ ID NO: 170382 - protein, 8 aa, Homo Sapiens
FTSTPVSL

SEQ ID NO: 170383 - protein, 8 aa, Homo Sapiens
FTTDAIAL

SEQ ID NO: 170384 - protein, 8 aa, Homo Sapiens
FVSFPLYL

SEQ ID NO: 170385 - protein, 8 aa, Homo Sapiens
FVSPEVFL

SEQ ID NO: 170386 - protein, 8 aa, Homo Sapiens
GAAPFIWL

SEQ ID NO: 170387 - protein, 8 aa, Homo Sapiens
GAARPVSL

SEQ ID NO: 170388 - protein, 8 aa, Homo Sapiens
GAAVPVEL

SEQ ID NO: 170389 - protein, 8 aa, Homo Sapiens
GAGAPVYL

SEQ ID NO: 170390 - protein, 8 aa, Homo Sapiens
GAGAPVYM

SEQ ID NO: 170391 - protein, 8 aa, Homo Sapiens
GAGPTMLL

SEQ ID NO: 170392 - protein, 8 aa, Homo Sapiens
GAGPYVDL

SEQ ID NO: 170393 - protein, 8 aa, Homo Sapiens
GASKAVFL

SEQ ID NO: 170394 - protein, 8 aa, Homo Sapiens
GASKPNAL

SEQ ID NO: 170395 - protein, 8 aa, Homo Sapiens
GASLFLLL

SEQ ID NO: 170396 - protein, 8 aa, Homo Sapiens
GATVEIHL

SEQ ID NO: 170397 - protein, 8 aa, Homo Sapiens
GIANPLLL

SEQ ID NO: 170398 - protein, 8 aa, Homo Sapiens
GIGVPIML

SEQ ID NO: 170399 - protein, 8 aa, Homo Sapiens
GISQPIWL

SEQ ID NO: 170400 - protein, 8 aa, Homo Sapiens
GLGPVEYL

SEQ ID NO: 170401 - protein, 8 aa, Homo Sapiens
GQALPIHL

SEQ ID NO: 170402 - protein, 8 aa, Homo Sapiens
GVGPLLYL

SEQ ID NO: 170403 - protein, 8 aa, Homo Sapiens
HAAEALLL

SEQ ID NO: 170404 - protein, 8 aa, Homo Sapiens
HAAIVIFL

SEQ ID NO: 170405 - protein, 8 aa, Homo Sapiens
HATVPIRL

SEQ ID NO: 170406 - protein, 8 aa, Homo Sapiens
HRGFSGLQ

SEQ ID NO: 170407 - protein, 8 aa, Homo Sapiens
HTGPITCL

SEQ ID NO: 170408 - protein, 8 aa, Homo Sapiens
IADRPLYL

SEQ ID NO: 170409 - protein, 8 aa, Homo Sapiens
IAGPVVEI

SEQ ID NO: 170410 - protein, 8 aa, Homo Sapiens
ITKSIPIL

SEQ ID NO: 170411 - protein, 8 aa, Homo Sapiens
IVAKQVLL

SEQ ID NO: 170412 - protein, 8 aa, Homo Sapiens
IVGPVVGL

SEQ ID NO: 170413 - protein, 8 aa, Homo Sapiens
KAAKELRL

SEQ ID NO: 170414 - protein, 8 aa, Homo Sapiens
KAAQEVKL

SEQ ID NO: 170415 - protein, 8 aa, Homo Sapiens
KIHEPIML

SEQ ID NO: 170416 - protein, 8 aa, Homo Sapiens
KLSKPVYL

SEQ ID NO: 170417 - protein, 8 aa, Homo Sapiens
KSGPVVSL

SEQ ID NO: 170418 - protein, 8 aa, Homo Sapiens
LAAGAVFL

SEQ ID NO: 170419 - protein, 8 aa, Homo Sapiens
LAGPALEL

SEQ ID NO: 170420 - protein, 8 aa, Homo Sapiens
LAGPASNL

SEQ ID NO: 170421 - protein, 8 aa, Homo Sapiens
LAGPVLGL

SEQ ID NO: 170422 - protein, 8 aa, Homo Sapiens
LFGMIITI

SEQ ID NO: 170423 - protein, 8 aa, Homo Sapiens
LIGPPLLI

SEQ ID NO: 170424 - protein, 8 aa, Homo Sapiens
LLGPTVML

SEQ ID NO: 170425 - protein, 8 aa, Homo Sapiens
LQGPILRL

SEQ ID NO: 170426 - protein, 8 aa, Homo Sapiens
LSSDPIAL

SEQ ID NO: 170427 - protein, 8 aa, Homo Sapiens
LTAPEIIL

SEQ ID NO: 170428 - protein, 8 aa, Homo Sapiens
LTGPVLEL

SEQ ID NO: 170429 - protein, 8 aa, Homo Sapiens
LVGPQIYL

SEQ ID NO: 170430 - protein, 8 aa, Homo Sapiens
MAGDIILL

SEQ ID NO: 170431 - protein, 8 aa, Homo Sapiens
MAGSPVFL

SEQ ID NO: 170432 - protein, 8 aa, Homo Sapiens
NAAEAMLL

SEQ ID NO: 170433 - protein, 8 aa, Homo Sapiens
NAGPAIVI

SEQ ID NO: 170434 - protein, 8 aa, Homo Sapiens
PPAPPVFL

SEQ ID NO: 170435 - protein, 8 aa, Homo Sapiens
QAAPPIEL

SEQ ID NO: 170436 - protein, 8 aa, Homo Sapiens
QAGPVIKV

SEQ ID NO: 170437 - protein, 8 aa, Homo Sapiens
RAAEKLYL

SEQ ID NO: 170438 - protein, 8 aa, Homo Sapiens
RAFREIQL

SEQ ID NO: 170439 - protein, 8 aa, Homo Sapiens
RAVFPIYL

SEQ ID NO: 170440 - protein, 8 aa, Homo Sapiens
SAAAELYL

SEQ ID NO: 170441 - protein, 8 aa, Homo Sapiens
SAAAPQLL

SEQ ID NO: 170442 - protein, 8 aa, Homo Sapiens
SAAAVSML

SEQ ID NO: 170443 - protein, 8 aa, Homo Sapiens
SAAFAVKL

SEQ ID NO: 170444 - protein, 8 aa, Homo Sapiens
SAAHEVEL

SEQ ID NO: 170445 - protein, 8 aa, Homo Sapiens
SAAPAIQL

SEQ ID NO: 170446 - protein, 8 aa, Homo Sapiens
SAAPAIYL

SEQ ID NO: 170447 - protein, 8 aa, Homo Sapiens
SAAPPLDL

SEQ ID NO: 170448 - protein, 8 aa, Homo Sapiens
SAAPVAHL

SEQ ID NO: 170449 - protein, 8 aa, Homo Sapiens
SAAQPLNL

SEQ ID NO: 170450 - protein, 8 aa, Homo Sapiens
SAASRVFL

SEQ ID NO: 170451 - protein, 8 aa, Homo Sapiens
SAATATWL

SEQ ID NO: 170452 - protein, 8 aa, Homo Sapiens
SAGPLLRL

SEQ ID NO: 170453 - protein, 8 aa, Homo Sapiens
SAPAGVQL

SEQ ID NO: 170454 - protein, 8 aa, Homo Sapiens
SATGEIYL

SEQ ID NO: 170455 - protein, 8 aa, Homo Sapiens
SATLPNYL

SEQ ID NO: 170456 - protein, 8 aa, Homo Sapiens
SAYEVIKL

SEQ ID NO: 170457 - protein, 8 aa, Homo Sapiens
SIAGPVLL

SEQ ID NO: 170458 - protein, 8 aa, Homo Sapiens
SLAPPLCL

SEQ ID NO: 170459 - protein, 8 aa, Homo Sapiens
SSGGVIRL

SEQ ID NO: 170460 - protein, 8 aa, Homo Sapiens
SSGREIYL

SEQ ID NO: 170461 - protein, 8 aa, Homo Sapiens
SSSDAIYL

SEQ ID NO: 170462 - protein, 8 aa, Homo Sapiens
STARHLYL

SEQ ID NO: 170463 - protein, 8 aa, Homo Sapiens
STGPIVDL

SEQ ID NO: 170464 - protein, 8 aa, Homo Sapiens
STTRELYL

SEQ ID NO: 170465 - protein, 8 aa, Homo Sapiens
SVAQPIHL

SEQ ID NO: 170466 - protein, 8 aa, Homo Sapiens
SVATVVYL

SEQ ID NO: 170467 - protein, 8 aa, Homo Sapiens
SVGPVSNL

SEQ ID NO: 170468 - protein, 8 aa, Homo Sapiens
SVGQPVFL

SEQ ID NO: 170469 - protein, 8 aa, Homo Sapiens
SVSKEVFL

SEQ ID NO: 170470 - protein, 8 aa, Homo Sapiens
TAAGAVFL

SEQ ID NO: 170471 - protein, 8 aa, Homo Sapiens
TAAKEIEV

SEQ ID NO: 170472 - protein, 8 aa, Homo Sapiens
TAAPTVCL

SEQ ID NO: 170473 - protein, 8 aa, Homo Sapiens
TAAVHIIL

SEQ ID NO: 170474 - protein, 8 aa, Homo Sapiens
TAGPAVHL

SEQ ID NO: 170475 - protein, 8 aa, Homo Sapiens
TASEPLTL

SEQ ID NO: 170476 - protein, 8 aa, Homo Sapiens
TISPIIKL

SEQ ID NO: 170477 - protein, 8 aa, Homo Sapiens
TTAAPLLL

SEQ ID NO: 170478 - protein, 8 aa, Homo Sapiens
VAAAVSYL

SEQ ID NO: 170479 - protein, 8 aa, Homo Sapiens
VAAKETLL

SEQ ID NO: 170480 - protein, 8 aa, Homo Sapiens
VAAKEVVL

SEQ ID NO: 170481 - protein, 8 aa, Homo Sapiens
VAAKSVKL

SEQ ID NO: 170482 - protein, 8 aa, Homo Sapiens
VAAPILCL

SEQ ID NO: 170483 - protein, 8 aa, Homo Sapiens
VAATVVYL

SEQ ID NO: 170484 - protein, 8 aa, Homo Sapiens
VAGGAVYL

SEQ ID NO: 170485 - protein, 8 aa, Homo Sapiens
VAGPSVTL

SEQ ID NO: 170486 - protein, 8 aa, Homo Sapiens
VAGQVVEL

SEQ ID NO: 170487 - protein, 8 aa, Homo Sapiens
VAHKEIKL

SEQ ID NO: 170488 - protein, 8 aa, Homo Sapiens
VASKFITL

SEQ ID NO: 170489 - protein, 8 aa, Homo Sapiens
VATGPLSL

SEQ ID NO: 170490 - protein, 8 aa, Homo Sapiens
VGGPEIEL

SEQ ID NO: 170491 - protein, 8 aa, Homo Sapiens
VGSRPIKL

SEQ ID NO: 170492 - protein, 8 aa, Homo Sapiens
VIGPPVVL

SEQ ID NO: 170493 - protein, 8 aa, Homo Sapiens
VLAPVIDL

SEQ ID NO: 170494 - protein, 8 aa, Homo Sapiens
VSGPRLFL

SEQ ID NO: 170495 - protein, 8 aa, Homo Sapiens
VSSHEVFL

SEQ ID NO: 170496 - protein, 8 aa, Homo Sapiens
VTAKATIL

SEQ ID NO: 170497 - protein, 8 aa, Homo Sapiens
VVGPKICL

SEQ ID NO: 170498 - protein, 8 aa, Homo Sapiens
YAACEQRL

SEQ ID NO: 170499 - protein, 8 aa, Homo Sapiens
YAAEGQKL

SEQ ID NO: 170500 - protein, 8 aa, Homo Sapiens
YAAGENIR

SEQ ID NO: 170501 - protein, 8 aa, Homo Sapiens
YAAIPIKF

SEQ ID NO: 170502 - protein, 8 aa, Homo Sapiens
YAAQPELL

SEQ ID NO: 170503 - protein, 8 aa, Homo Sapiens
YAATFLHL

SEQ ID NO: 170504 - protein, 8 aa, Homo Sapiens
YAIEAIKL

SEQ ID NO: 170505 - protein, 8 aa, Homo Sapiens
YASKEVIL

SEQ ID NO: 170506 - protein, 8 aa, Homo Sapiens
YGSDRILL

SEQ ID NO: 170507 - protein, 8 aa, Homo Sapiens
YGSVPVLL

SEQ ID NO: 170508 - protein, 8 aa, Homo Sapiens
YIALPLTL

SEQ ID NO: 170509 - protein, 8 aa, Homo Sapiens
YIDKVRFL

SEQ ID NO: 170510 - protein, 8 aa, Homo Sapiens
YLAKVLWL

SEQ ID NO: 170511 - protein, 8 aa, Homo Sapiens
YLGKVLEL

SEQ ID NO: 170512 - protein, 8 aa, Homo Sapiens
YSNKEIFL

SEQ ID NO: 170513 - protein, 8 aa, Homo Sapiens
YSTEPNNL

SEQ ID NO: 170514 - protein, 8 aa, Homo Sapiens
YTAEPVTL

SEQ ID NO: 170515 - protein, 9 aa, Homo Sapiens
AAAAAIVFL

SEQ ID NO: 170516 - protein, 9 aa, Homo Sapiens
AAAAGMLLL

SEQ ID NO: 170517 - protein, 9 aa, Homo Sapiens
AAAASYPAL

SEQ ID NO: 170518 - protein, 9 aa, Homo Sapiens
AAADIVNFL

SEQ ID NO: 170519 - protein, 9 aa, Homo Sapiens
AAADSAVRL

SEQ ID NO: 170520 - protein, 9 aa, Homo Sapiens
AAAERPPRL

SEQ ID NO: 170521 - protein, 9 aa, Homo Sapiens
AAAGAPALL

SEQ ID NO: 170522 - protein, 9 aa, Homo Sapiens
AAAGSPLSL

SEQ ID NO: 170523 - protein, 9 aa, Homo Sapiens
AAAGSPVFL

SEQ ID NO: 170524 - protein, 9 aa, Homo Sapiens
AAAPHLLLL

SEQ ID NO: 170525 - protein, 9 aa, Homo Sapiens
AAAPSLLIL

SEQ ID NO: 170526 - protein, 9 aa, Homo Sapiens
AAAPTANLL

SEQ ID NO: 170527 - protein, 9 aa, Homo Sapiens
AAAQEPLQL

SEQ ID NO: 170528 - protein, 9 aa, Homo Sapiens
AAASHPLLL

SEQ ID NO: 170529 - protein, 9 aa, Homo Sapiens
AAASKVLNL

SEQ ID NO: 170530 - protein, 9 aa, Homo Sapiens
AAASQFTLL

SEQ ID NO: 170531 - protein, 9 aa, Homo Sapiens
AAATLTSKL

SEQ ID NO: 170532 - protein, 9 aa, Homo Sapiens
AAATSALLL

SEQ ID NO: 170533 - protein, 9 aa, Homo Sapiens
AAAVQAFYL

SEQ ID NO: 170534 - protein, 9 aa, Homo Sapiens
AACGGHVEL

SEQ ID NO: 170535 - protein, 9 aa, Homo Sapiens
AACRVIARL

SEQ ID NO: 170536 - protein, 9 aa, Homo Sapiens
AACSFFILL

SEQ ID NO: 170537 - protein, 9 aa, Homo Sapiens
AADPSVVNL

SEQ ID NO: 170538 - protein, 9 aa, Homo Sapiens
AADPVSPLL

SEQ ID NO: 170539 - protein, 9 aa, Homo Sapiens
AAFGRDLFL

SEQ ID NO: 170540 - protein, 9 aa, Homo Sapiens
AAFPSSLRL

SEQ ID NO: 170541 - protein, 9 aa, Homo Sapiens
AAFSLTSHL

SEQ ID NO: 170542 - protein, 9 aa, Homo Sapiens
AAGSHVIIL

SEQ ID NO: 170543 - protein, 9 aa, Homo Sapiens
AAIAPPTSL

SEQ ID NO: 170544 - protein, 9 aa, Homo Sapiens
AAIASLLYL

SEQ ID NO: 170545 - protein, 9 aa, Homo Sapiens
AAIGEATRL

SEQ ID NO: 170546 - protein, 9 aa, Homo Sapiens
AAIMQALWL

SEQ ID NO: 170547 - protein, 9 aa, Homo Sapiens
AAINRQINL

SEQ ID NO: 170548 - protein, 9 aa, Homo Sapiens
AAINRYSRL

SEQ ID NO: 170549 - protein, 9 aa, Homo Sapiens
AAIPPDYLL

SEQ ID NO: 170550 - protein, 9 aa, Homo Sapiens
AAIQGATLL

SEQ ID NO: 170551 - protein, 9 aa, Homo Sapiens
AAIQQRTLL

SEQ ID NO: 170552 - protein, 9 aa, Homo Sapiens
AAIWFRTYL

SEQ ID NO: 170553 - protein, 9 aa, Homo Sapiens
AAIYLVTSL

SEQ ID NO: 170554 - protein, 9 aa, Homo Sapiens
AALDKATVL

SEQ ID NO: 170555 - protein, 9 aa, Homo Sapiens
AALPKATIL

SEQ ID NO: 170556 - protein, 9 aa, Homo Sapiens
AALPRLIYL

SEQ ID NO: 170557 - protein, 9 aa, Homo Sapiens
AALPVYQEL

SEQ ID NO: 170558 - protein, 9 aa, Homo Sapiens
AALRLLTYL

SEQ ID NO: 170559 - protein, 9 aa, Homo Sapiens
AALSQVTLL

SEQ ID NO: 170560 - protein, 9 aa, Homo Sapiens
AANKTIIYL

SEQ ID NO: 170561 - protein, 9 aa, Homo Sapiens
AAQTKATFL

SEQ ID NO: 170562 - protein, 9 aa, Homo Sapiens
AASAQLLRL

SEQ ID NO: 170563 - protein, 9 aa, Homo Sapiens
AASPQAPTL

SEQ ID NO: 170564 - protein, 9 aa, Homo Sapiens
AASPSELHL

SEQ ID NO: 170565 - protein, 9 aa, Homo Sapiens
AASSSVCKL

SEQ ID NO: 170566 - protein, 9 aa, Homo Sapiens
AASTLVTWL

SEQ ID NO: 170567 - protein, 9 aa, Homo Sapiens
AATAQVSHL

SEQ ID NO: 170568 - protein, 9 aa, Homo Sapiens
AATDIFSYL

SEQ ID NO: 170569 - protein, 9 aa, Homo Sapiens
AATDITSSL

SEQ ID NO: 170570 - protein, 9 aa, Homo Sapiens
AATEREISL

SEQ ID NO: 170571 - protein, 9 aa, Homo Sapiens
AATHLTSKL

SEQ ID NO: 170572 - protein, 9 aa, Homo Sapiens
AATHRVVEL

SEQ ID NO: 170573 - protein, 9 aa, Homo Sapiens
AATKILTEL

SEQ ID NO: 170574 - protein, 9 aa, Homo Sapiens
AATKVTTVL

SEQ ID NO: 170575 - protein, 9 aa, Homo Sapiens
AATSLITTL

SEQ ID NO: 170576 - protein, 9 aa, Homo Sapiens
AATSRIAEL

SEQ ID NO: 170577 - protein, 9 aa, Homo Sapiens
AATVTITHL

SEQ ID NO: 170578 - protein, 9 aa, Homo Sapiens
AAVAPVLSI

SEQ ID NO: 170579 - protein, 9 aa, Homo Sapiens
AAVDRTTEL

SEQ ID NO: 170580 - protein, 9 aa, Homo Sapiens
AAVFGVTRL

SEQ ID NO: 170581 - protein, 9 aa, Homo Sapiens
AAVGEPAFL

SEQ ID NO: 170582 - protein, 9 aa, Homo Sapiens
AAVGFLSSL

SEQ ID NO: 170583 - protein, 9 aa, Homo Sapiens
AAVGFPTHL

SEQ ID NO: 170584 - protein, 9 aa, Homo Sapiens
AAVHGTTKL

SEQ ID NO: 170585 - protein, 9 aa, Homo Sapiens
AAVNHISQL

SEQ ID NO: 170586 - protein, 9 aa, Homo Sapiens
AAVPRAAFL

SEQ ID NO: 170587 - protein, 9 aa, Homo Sapiens
AAVRETVML

SEQ ID NO: 170588 - protein, 9 aa, Homo Sapiens
AAVRKPIVL

SEQ ID NO: 170589 - protein, 9 aa, Homo Sapiens
AAVSLITCL

SEQ ID NO: 170590 - protein, 9 aa, Homo Sapiens
AAYAGGLVL

SEQ ID NO: 170591 - protein, 9 aa, Homo Sapiens
AAYALVSNL

SEQ ID NO: 170592 - protein, 9 aa, Homo Sapiens
AAYCTGLLL

SEQ ID NO: 170593 - protein, 9 aa, Homo Sapiens
AAYDRYLKL

SEQ ID NO: 170594 - protein, 9 aa, Homo Sapiens
AAYGHRLCL

SEQ ID NO: 170595 - protein, 9 aa, Homo Sapiens
AAYGNRQNL

SEQ ID NO: 170596 - protein, 9 aa, Homo Sapiens
AAYHLIIEL

SEQ ID NO: 170597 - protein, 9 aa, Homo Sapiens
AAYLRALSL

SEQ ID NO: 170598 - protein, 9 aa, Homo Sapiens
AAYPRPGML

SEQ ID NO: 170599 - protein, 9 aa, Homo Sapiens
AAYRRALEL

SEQ ID NO: 170600 - protein, 9 aa, Homo Sapiens
AAYYHPSYL

SEQ ID NO: 170601 - protein, 9 aa, Homo Sapiens
AFLIPLLVW

SEQ ID NO: 170602 - protein, 9 aa, Homo Sapiens
AGIAHPSAL

SEQ ID NO: 170603 - protein, 9 aa, Homo Sapiens
AGVNTVTTL

SEQ ID NO: 170604 - protein, 9 aa, Homo Sapiens
AGVPLFLLE

SEQ ID NO: 170605 - protein, 9 aa, Homo Sapiens
AIIDKYIKL

SEQ ID NO: 170606 - protein, 9 aa, Homo Sapiens
AILMTVALL

SEQ ID NO: 170607 - protein, 9 aa, Homo Sapiens
AIMDLLLRL

SEQ ID NO: 170608 - protein, 9 aa, Homo Sapiens
AIVFIITRL

SEQ ID NO: 170609 - protein, 9 aa, Homo Sapiens
ALDVFALWL

SEQ ID NO: 170610 - protein, 9 aa, Homo Sapiens
ALPKLPISL

SEQ ID NO: 170611 - protein, 9 aa, Homo Sapiens
ALYSKGILL

SEQ ID NO: 170612 - protein, 9 aa, Homo Sapiens
ANSHQGQML

SEQ ID NO: 170613 - protein, 9 aa, Homo Sapiens
AQFEHTILL

SEQ ID NO: 170614 - protein, 9 aa, Homo Sapiens
AQLELISRI

SEQ ID NO: 170615 - protein, 9 aa, Homo Sapiens
AQYDRQIRL

SEQ ID NO: 170616 - protein, 9 aa, Homo Sapiens
ASDPRIIRL

SEQ ID NO: 170617 - protein, 9 aa, Homo Sapiens
ASIGSTIFL

SEQ ID NO: 170618 - protein, 9 aa, Homo Sapiens
ASINSTVRL

SEQ ID NO: 170619 - protein, 9 aa, Homo Sapiens
ASIWFISCL

SEQ ID NO: 170620 - protein, 9 aa, Homo Sapiens
ASTARHLYL

SEQ ID NO: 170621 - protein, 9 aa, Homo Sapiens
ASTCVIIKL

SEQ ID NO: 170622 - protein, 9 aa, Homo Sapiens
ASVDKVLEL

SEQ ID NO: 170623 - protein, 9 aa, Homo Sapiens
ASVDKVTRL

SEQ ID NO: 170624 - protein, 9 aa, Homo Sapiens
ASVGKTSIL

SEQ ID NO: 170625 - protein, 9 aa, Homo Sapiens
ATPVDPLFL

SEQ ID NO: 170626 - protein, 9 aa, Homo Sapiens
ATYHRAIKV

SEQ ID NO: 170627 - protein, 9 aa, Homo Sapiens
AVIESVTFL

SEQ ID NO: 170628 - protein, 9 aa, Homo Sapiens
AVIKGLTYL

SEQ ID NO: 170629 - protein, 9 aa, Homo Sapiens
AVVPLVGKL

SEQ ID NO: 170630 - protein, 9 aa, Homo Sapiens
EAVDLITRL

SEQ ID NO: 170631 - protein, 9 aa, Homo Sapiens
FAADIISVL

SEQ ID NO: 170632 - protein, 9 aa, Homo Sapiens
FAAGIIAHL

SEQ ID NO: 170633 - protein, 9 aa, Homo Sapiens
FAAGSATRL

SEQ ID NO: 170634 - protein, 9 aa, Homo Sapiens
FAAQSLVQL

SEQ ID NO: 170635 - protein, 9 aa, Homo Sapiens
FADAHRPKL

SEQ ID NO: 170636 - protein, 9 aa, Homo Sapiens
FADDGVKYL

SEQ ID NO: 170637 - protein, 9 aa, Homo Sapiens
FADFERHFL

SEQ ID NO: 170638 - protein, 9 aa, Homo Sapiens
FADGHVLEL

SEQ ID NO: 170639 - protein, 9 aa, Homo Sapiens
FADGVILLL

SEQ ID NO: 170640 - protein, 9 aa, Homo Sapiens
FADKHIQVL

SEQ ID NO: 170641 - protein, 9 aa, Homo Sapiens
FADQAEILL

SEQ ID NO: 170642 - protein, 9 aa, Homo Sapiens
FADQEVRSL

SEQ ID NO: 170643 - protein, 9 aa, Homo Sapiens
FADSHLWKL

SEQ ID NO: 170644 - protein, 9 aa, Homo Sapiens
FAERSVAKL

SEQ ID NO: 170645 - protein, 9 aa, Homo Sapiens
FAFRHVLKL

SEQ ID NO: 170646 - protein, 9 aa, Homo Sapiens
FAFRNFLYL

SEQ ID NO: 170647 - protein, 9 aa, Homo Sapiens
FAGNTPLHL

SEQ ID NO: 170648 - protein, 9 aa, Homo Sapiens
FAHHLPVWL

SEQ ID NO: 170649 - protein, 9 aa, Homo Sapiens
FAHLINVEF

SEQ ID NO: 170650 - protein, 9 aa, Homo Sapiens
FAIDPHLLL

SEQ ID NO: 170651 - protein, 9 aa, Homo Sapiens
FAILSFLHI

SEQ ID NO: 170652 - protein, 9 aa, Homo Sapiens
FAIPGSIFL

SEQ ID NO: 170653 - protein, 9 aa, Homo Sapiens
FAIPGSSFL

SEQ ID NO: 170654 - protein, 9 aa, Homo Sapiens
FAIPLIEKL

SEQ ID NO: 170655 - protein, 9 aa, Homo Sapiens
FAISILQQI

SEQ ID NO: 170656 - protein, 9 aa, Homo Sapiens
FALPSPQHI

SEQ ID NO: 170657 - protein, 9 aa, Homo Sapiens
FALRIASRL

SEQ ID NO: 170658 - protein, 9 aa, Homo Sapiens
FALSGPLFL

SEQ ID NO: 170659 - protein, 9 aa, Homo Sapiens
FAMPYFIQV

SEQ ID NO: 170660 - protein, 9 aa, Homo Sapiens
FANERCLQL

SEQ ID NO: 170661 - protein, 9 aa, Homo Sapiens
FASEYPLIL

SEQ ID NO: 170662 - protein, 9 aa, Homo Sapiens
FASFKPTYL

SEQ ID NO: 170663 - protein, 9 aa, Homo Sapiens
FASHVSPEV

SEQ ID NO: 170664 - protein, 9 aa, Homo Sapiens
FASKHAVKL

SEQ ID NO: 170665 - protein, 9 aa, Homo Sapiens
FASTYLLLL

SEQ ID NO: 170666 - protein, 9 aa, Homo Sapiens
FATKTVIYL

SEQ ID NO: 170667 - protein, 9 aa, Homo Sapiens
FATKVVHLL

SEQ ID NO: 170668 - protein, 9 aa, Homo Sapiens
FAVALPQLL

SEQ ID NO: 170669 - protein, 9 aa, Homo Sapiens
FAVDREARL

SEQ ID NO: 170670 - protein, 9 aa, Homo Sapiens
FAVEYFTRL

SEQ ID NO: 170671 - protein, 9 aa, Homo Sapiens
FAVNSVLRL

SEQ ID NO: 170672 - protein, 9 aa, Homo Sapiens
FAVTLETVL

SEQ ID NO: 170673 - protein, 9 aa, Homo Sapiens
FAVYIHALL

SEQ ID NO: 170674 - protein, 9 aa, Homo Sapiens
FAYEGPMYL

SEQ ID NO: 170675 - protein, 9 aa, Homo Sapiens
FAYGLLMEL

SEQ ID NO: 170676 - protein, 9 aa, Homo Sapiens
FAYLRDLLI

SEQ ID NO: 170677 - protein, 9 aa, Homo Sapiens
FAYNFREEL

SEQ ID NO: 170678 - protein, 9 aa, Homo Sapiens
FAYPAIRYL

SEQ ID NO: 170679 - protein, 9 aa, Homo Sapiens
FAYPAPLEV

SEQ ID NO: 170680 - protein, 9 aa, Homo Sapiens
FAYTRLQLL

SEQ ID NO: 170681 - protein, 9 aa, Homo Sapiens
FGCSAVVRL

SEQ ID NO: 170682 - protein, 9 aa, Homo Sapiens
FGIDRPAEL

SEQ ID NO: 170683 - protein, 9 aa, Homo Sapiens
FGLDLVTEL

SEQ ID NO: 170684 - protein, 9 aa, Homo Sapiens
FGYIHAIKL

SEQ ID NO: 170685 - protein, 9 aa, Homo Sapiens
FGYKHVLTL

SEQ ID NO: 170686 - protein, 9 aa, Homo Sapiens
FGYPDPTYL

SEQ ID NO: 170687 - protein, 9 aa, Homo Sapiens
FIGKIPIML

SEQ ID NO: 170688 - protein, 9 aa, Homo Sapiens
FIGKLRSNL

SEQ ID NO: 170689 - protein, 9 aa, Homo Sapiens
FIPKFITHL

SEQ ID NO: 170690 - protein, 9 aa, Homo Sapiens
FITEFPLFL

SEQ ID NO: 170691 - protein, 9 aa, Homo Sapiens
FIYKHGLKL

SEQ ID NO: 170692 - protein, 9 aa, Homo Sapiens
FLAHIYTEL

SEQ ID NO: 170693 - protein, 9 aa, Homo Sapiens
FLANVSTVL

SEQ ID NO: 170694 - protein, 9 aa, Homo Sapiens
FLCDVDIRL

SEQ ID NO: 170695 - protein, 9 aa, Homo Sapiens
FLFELPSRL

SEQ ID NO: 170696 - protein, 9 aa, Homo Sapiens
FLFSKFIEL

SEQ ID NO: 170697 - protein, 9 aa, Homo Sapiens
FLLQHQTFL

SEQ ID NO: 170698 - protein, 9 aa, Homo Sapiens
FLPDHPIVL

SEQ ID NO: 170699 - protein, 9 aa, Homo Sapiens
FLPQKIIYL

SEQ ID NO: 170700 - protein, 9 aa, Homo Sapiens
FLPSSVLWL

SEQ ID NO: 170701 - protein, 9 aa, Homo Sapiens
FLSHIPITL

SEQ ID NO: 170702 - protein, 9 aa, Homo Sapiens
FLSSVIQNL

SEQ ID NO: 170703 - protein, 9 aa, Homo Sapiens
FLTRIISQL

SEQ ID NO: 170704 - protein, 9 aa, Homo Sapiens
FLWERPTLL

SEQ ID NO: 170705 - protein, 9 aa, Homo Sapiens
FLYAGHIFL

SEQ ID NO: 170706 - protein, 9 aa, Homo Sapiens
FLYPFPLAL

SEQ ID NO: 170707 - protein, 9 aa, Homo Sapiens
FLYQYSTRL

SEQ ID NO: 170708 - protein, 9 aa, Homo Sapiens
FMVDRVVDL

SEQ ID NO: 170709 - protein, 9 aa, Homo Sapiens
FQNIRPLFI

SEQ ID NO: 170710 - protein, 9 aa, Homo Sapiens
FQSSAVMAL

SEQ ID NO: 170711 - protein, 9 aa, Homo Sapiens
FQYSKSPSL

SEQ ID NO: 170712 - protein, 9 aa, Homo Sapiens
FSCGVISTL

SEQ ID NO: 170713 - protein, 9 aa, Homo Sapiens
FSHAQTVVL

SEQ ID NO: 170714 - protein, 9 aa, Homo Sapiens
FSHSQITRL

SEQ ID NO: 170715 - protein, 9 aa, Homo Sapiens
FSIPCEPNL

SEQ ID NO: 170716 - protein, 9 aa, Homo Sapiens
FSLAPITKL

SEQ ID NO: 170717 - protein, 9 aa, Homo Sapiens
FSLMVVNRL

SEQ ID NO: 170718 - protein, 9 aa, Homo Sapiens
FSLPGATCL

SEQ ID NO: 170719 - protein, 9 aa, Homo Sapiens
FSLPHVGYL

SEQ ID NO: 170720 - protein, 9 aa, Homo Sapiens
FSNPRALYL

SEQ ID NO: 170721 - protein, 9 aa, Homo Sapiens
FSTFTITRL

SEQ ID NO: 170722 - protein, 9 aa, Homo Sapiens
FSVCHILLL

SEQ ID NO: 170723 - protein, 9 aa, Homo Sapiens
FSVPLPARL

SEQ ID NO: 170724 - protein, 9 aa, Homo Sapiens
FTCQRILFL

SEQ ID NO: 170725 - protein, 9 aa, Homo Sapiens
FTCRHVVHL

SEQ ID NO: 170726 - protein, 9 aa, Homo Sapiens
FTDVNKIYL

SEQ ID NO: 170727 - protein, 9 aa, Homo Sapiens
FTIGKAIWL

SEQ ID NO: 170728 - protein, 9 aa, Homo Sapiens
FTLSHITQL

SEQ ID NO: 170729 - protein, 9 aa, Homo Sapiens
FTMKTVLML

SEQ ID NO: 170730 - protein, 9 aa, Homo Sapiens
FTPDIPTML

SEQ ID NO: 170731 - protein, 9 aa, Homo Sapiens
FTSDIALRL

SEQ ID NO: 170732 - protein, 9 aa, Homo Sapiens
FTYKQVVDL

SEQ ID NO: 170733 - protein, 9 aa, Homo Sapiens
FTYNIPTCL

SEQ ID NO: 170734 - protein, 9 aa, Homo Sapiens
FVAESHIIL

SEQ ID NO: 170735 - protein, 9 aa, Homo Sapiens
FVANAIIHL

SEQ ID NO: 170736 - protein, 9 aa, Homo Sapiens
FVFPGELLL

SEQ ID NO: 170737 - protein, 9 aa, Homo Sapiens
FVHDLVLYL

SEQ ID NO: 170738 - protein, 9 aa, Homo Sapiens
FVIDLQTRL

SEQ ID NO: 170739 - protein, 9 aa, Homo Sapiens
FVLQRLVFL

SEQ ID NO: 170740 - protein, 9 aa, Homo Sapiens
FVLRVMTQL

SEQ ID NO: 170741 - protein, 9 aa, Homo Sapiens
FVMETFVHL

SEQ ID NO: 170742 - protein, 9 aa, Homo Sapiens
FVVDIESRL

SEQ ID NO: 170743 - protein, 9 aa, Homo Sapiens
FVYENPISL

SEQ ID NO: 170744 - protein, 9 aa, Homo Sapiens
GAADGVIRL

SEQ ID NO: 170745 - protein, 9 aa, Homo Sapiens
GAAPAPTAV

SEQ ID NO: 170746 - protein, 9 aa, Homo Sapiens
GADARALML

SEQ ID NO: 170747 - protein, 9 aa, Homo Sapiens
GADNSVVRF

SEQ ID NO: 170748 - protein, 9 aa, Homo Sapiens
GADPNATTL

SEQ ID NO: 170749 - protein, 9 aa, Homo Sapiens
GADPSTVEM

SEQ ID NO: 170750 - protein, 9 aa, Homo Sapiens
GAFFGPIRL

SEQ ID NO: 170751 - protein, 9 aa, Homo Sapiens
GAFGKETDL

SEQ ID NO: 170752 - protein, 9 aa, Homo Sapiens
GAHQGVAVL

SEQ ID NO: 170753 - protein, 9 aa, Homo Sapiens
GAIARPACL

SEQ ID NO: 170754 - protein, 9 aa, Homo Sapiens
GAIFVPIHL

SEQ ID NO: 170755 - protein, 9 aa, Homo Sapiens
GAILVVTKL

SEQ ID NO: 170756 - protein, 9 aa, Homo Sapiens
GAINHVLQL

SEQ ID NO: 170757 - protein, 9 aa, Homo Sapiens
GAISKIFVL

SEQ ID NO: 170758 - protein, 9 aa, Homo Sapiens
GAQLHVTYL

SEQ ID NO: 170759 - protein, 9 aa, Homo Sapiens
GASNSAPHL

SEQ ID NO: 170760 - protein, 9 aa, Homo Sapiens
GATLRTSRL

SEQ ID NO: 170761 - protein, 9 aa, Homo Sapiens
GATPTPLLL

SEQ ID NO: 170762 - protein, 9 aa, Homo Sapiens
GATSLVTLL

SEQ ID NO: 170763 - protein, 9 aa, Homo Sapiens
GATTTAPSL

SEQ ID NO: 170764 - protein, 9 aa, Homo Sapiens
GATVTVLRL

SEQ ID NO: 170765 - protein, 9 aa, Homo Sapiens
GAVERPLSL

SEQ ID NO: 170766 - protein, 9 aa, Homo Sapiens
GAVGSRVTL

SEQ ID NO: 170767 - protein, 9 aa, Homo Sapiens
GAVKKLTKL

SEQ ID NO: 170768 - protein, 9 aa, Homo Sapiens
GAVPGITKF

SEQ ID NO: 170769 - protein, 9 aa, Homo Sapiens
GAVPIFIEL

SEQ ID NO: 170770 - protein, 9 aa, Homo Sapiens
GAVPIFIKL

SEQ ID NO: 170771 - protein, 9 aa, Homo Sapiens
GAVSTASHL

SEQ ID NO: 170772 - protein, 9 aa, Homo Sapiens
GAYGGGAKL

SEQ ID NO: 170773 - protein, 9 aa, Homo Sapiens
GAYGKVFLV

SEQ ID NO: 170774 - protein, 9 aa, Homo Sapiens
GAYHAVVLL

SEQ ID NO: 170775 - protein, 9 aa, Homo Sapiens
GAYKYIQEL

SEQ ID NO: 170776 - protein, 9 aa, Homo Sapiens
GAYRGGERL

SEQ ID NO: 170777 - protein, 9 aa, Homo Sapiens
GAYSPIVLL

SEQ ID NO: 170778 - protein, 9 aa, Homo Sapiens
GAYTQVIFL

SEQ ID NO: 170779 - protein, 9 aa, Homo Sapiens
GAYVHMVTH

SEQ ID NO: 170780 - protein, 9 aa, Homo Sapiens
GGITSVIKL

SEQ ID NO: 170781 - protein, 9 aa, Homo Sapiens
GISPVPINL

SEQ ID NO: 170782 - protein, 9 aa, Homo Sapiens
GIVGVFVKL

SEQ ID NO: 170783 - protein, 9 aa, Homo Sapiens
GLIDHQTYL

SEQ ID NO: 170784 - protein, 9 aa, Homo Sapiens
GLIENPALL

SEQ ID NO: 170785 - protein, 9 aa, Homo Sapiens
GLPRWVTLL

SEQ ID NO: 170786 - protein, 9 aa, Homo Sapiens
GLYCGKTLL

SEQ ID NO: 170787 - protein, 9 aa, Homo Sapiens
GLYEGLTWL

SEQ ID NO: 170788 - protein, 9 aa, Homo Sapiens
GQTSVVSFL

SEQ ID NO: 170789 - protein, 9 aa, Homo Sapiens
GQVGHILEL

SEQ ID NO: 170790 - protein, 9 aa, Homo Sapiens
GQYPRALEL

SEQ ID NO: 170791 - protein, 9 aa, Homo Sapiens
GQYSHLVLL

SEQ ID NO: 170792 - protein, 9 aa, Homo Sapiens
GSDPRVTQL

SEQ ID NO: 170793 - protein, 9 aa, Homo Sapiens
GSDPSIISL

SEQ ID NO: 170794 - protein, 9 aa, Homo Sapiens
GSSGGVIRL

SEQ ID NO: 170795 - protein, 9 aa, Homo Sapiens
GSTGTVAHL

SEQ ID NO: 170796 - protein, 9 aa, Homo Sapiens
GSTRIITRL

SEQ ID NO: 170797 - protein, 9 aa, Homo Sapiens
GSVNRVTIL

SEQ ID NO: 170798 - protein, 9 aa, Homo Sapiens
GSVSDIIRL

SEQ ID NO: 170799 - protein, 9 aa, Homo Sapiens
GSVSNPLFL

SEQ ID NO: 170800 - protein, 9 aa, Homo Sapiens
GSYFRVTLL

SEQ ID NO: 170801 - protein, 9 aa, Homo Sapiens
GSYGRKTVL

SEQ ID NO: 170802 - protein, 9 aa, Homo Sapiens
GTMGKPIKL

SEQ ID NO: 170803 - protein, 9 aa, Homo Sapiens
GTVDDVPKL

SEQ ID NO: 170804 - protein, 9 aa, Homo Sapiens
GTVEQIVYL

SEQ ID NO: 170805 - protein, 9 aa, Homo Sapiens
GTYTLIIRL

SEQ ID NO: 170806 - protein, 9 aa, Homo Sapiens
GVIATIAFL

SEQ ID NO: 170807 - protein, 9 aa, Homo Sapiens
GVSPEPIHL

SEQ ID NO: 170808 - protein, 9 aa, Homo Sapiens
GVVDHQTEL

SEQ ID NO: 170809 - protein, 9 aa, Homo Sapiens
HAAPQPQKL

SEQ ID NO: 170810 - protein, 9 aa, Homo Sapiens
HAGPVINTL

SEQ ID NO: 170811 - protein, 9 aa, Homo Sapiens
HAIFKLTYL

SEQ ID NO: 170812 - protein, 9 aa, Homo Sapiens
HAIYWPAFL

SEQ ID NO: 170813 - protein, 9 aa, Homo Sapiens
HAMQFPAEL

SEQ ID NO: 170814 - protein, 9 aa, Homo Sapiens
HASDRIIAL

SEQ ID NO: 170815 - protein, 9 aa, Homo Sapiens
HASSSIVSL

SEQ ID NO: 170816 - protein, 9 aa, Homo Sapiens
HAVLLVTQL

SEQ ID NO: 170817 - protein, 9 aa, Homo Sapiens
HAVRQPVFL

SEQ ID NO: 170818 - protein, 9 aa, Homo Sapiens
HAYDREVHL

SEQ ID NO: 170819 - protein, 9 aa, Homo Sapiens
HIPDVITYL

SEQ ID NO: 170820 - protein, 9 aa, Homo Sapiens
HQAFSVVFL

SEQ ID NO: 170821 - protein, 9 aa, Homo Sapiens
HQYDGLVEL

SEQ ID NO: 170822 - protein, 9 aa, Homo Sapiens
HSISIPTKL

SEQ ID NO: 170823 - protein, 9 aa, Homo Sapiens
HSLSFETQL

SEQ ID NO: 170824 - protein, 9 aa, Homo Sapiens
HSPGAVSSL

SEQ ID NO: 170825 - protein, 9 aa, Homo Sapiens
HVYHHASML

SEQ ID NO: 170826 - protein, 9 aa, Homo Sapiens
HVYSGVVNL

SEQ ID NO: 170827 - protein, 9 aa, Homo Sapiens
IAAGIFNDL

SEQ ID NO: 170828 - protein, 9 aa, Homo Sapiens
IAAGLYLLL

SEQ ID NO: 170829 - protein, 9 aa, Homo Sapiens
IAAKKVLRL

SEQ ID NO: 170830 - protein, 9 aa, Homo Sapiens
IAAPFTSKL

SEQ ID NO: 170831 - protein, 9 aa, Homo Sapiens
IADPNIAKL

SEQ ID NO: 170832 - protein, 9 aa, Homo Sapiens
IAIGKVLKL

SEQ ID NO: 170833 - protein, 9 aa, Homo Sapiens
IALEATQLL

SEQ ID NO: 170834 - protein, 9 aa, Homo Sapiens
IANPTATLL

SEQ ID NO: 170835 - protein, 9 aa, Homo Sapiens
IAPGVTHEL

SEQ ID NO: 170836 - protein, 9 aa, Homo Sapiens
IAYSRPVYF

SEQ ID NO: 170837 - protein, 9 aa, Homo Sapiens
IGAGAPVYL

SEQ ID NO: 170838 - protein, 9 aa, Homo Sapiens
IGVGAVTML

SEQ ID NO: 170839 - protein, 9 aa, Homo Sapiens
IGYPITLYL

SEQ ID NO: 170840 - protein, 9 aa, Homo Sapiens
IIFATPTKL

SEQ ID NO: 170841 - protein, 9 aa, Homo Sapiens
IITRVETYL

SEQ ID NO: 170842 - protein, 9 aa, Homo Sapiens
ILDPHVVLL

SEQ ID NO: 170843 - protein, 9 aa, Homo Sapiens
ILYGKIIHL

SEQ ID NO: 170844 - protein, 9 aa, Homo Sapiens
ISTNSHPIL

SEQ ID NO: 170845 - protein, 9 aa, Homo Sapiens
ISVGVINLL

SEQ ID NO: 170846 - protein, 9 aa, Homo Sapiens
ITSDQPILL

SEQ ID NO: 170847 - protein, 9 aa, Homo Sapiens
IVMEHVVFL

SEQ ID NO: 170848 - protein, 9 aa, Homo Sapiens
IVYPKPTWL

SEQ ID NO: 170849 - protein, 9 aa, Homo Sapiens
KAAEVYTRL

SEQ ID NO: 170850 - protein, 9 aa, Homo Sapiens
KAASKVTLL

SEQ ID NO: 170851 - protein, 9 aa, Homo Sapiens
KADGVPVYL

SEQ ID NO: 170852 - protein, 9 aa, Homo Sapiens
KADSVVVLL

SEQ ID NO: 170853 - protein, 9 aa, Homo Sapiens
KAFAKKTYL

SEQ ID NO: 170854 - protein, 9 aa, Homo Sapiens
KAFNHRSYL

SEQ ID NO: 170855 - protein, 9 aa, Homo Sapiens
KAFNTSSHL

SEQ ID NO: 170856 - protein, 9 aa, Homo Sapiens
KAFPYSSHL

SEQ ID NO: 170857 - protein, 9 aa, Homo Sapiens
KAFQHPSHL

SEQ ID NO: 170858 - protein, 9 aa, Homo Sapiens
KAFQKIVVL

SEQ ID NO: 170859 - protein, 9 aa, Homo Sapiens
KAFSYPSKL

SEQ ID NO: 170860 - protein, 9 aa, Homo Sapiens
KALGHPAML

SEQ ID NO: 170861 - protein, 9 aa, Homo Sapiens
KAPGSTSNL

SEQ ID NO: 170862 - protein, 9 aa, Homo Sapiens
KAPVTKVAA

SEQ ID NO: 170863 - protein, 9 aa, Homo Sapiens
KATGKISKL

SEQ ID NO: 170864 - protein, 9 aa, Homo Sapiens
KAVASVARL

SEQ ID NO: 170865 - protein, 9 aa, Homo Sapiens
KAVGTITKL

SEQ ID NO: 170866 - protein, 9 aa, Homo Sapiens
KAYELALYL

SEQ ID NO: 170867 - protein, 9 aa, Homo Sapiens
KAYERGISL

SEQ ID NO: 170868 - protein, 9 aa, Homo Sapiens
KAYVRVLDL

SEQ ID NO: 170869 - protein, 9 aa, Homo Sapiens
KAYYKSSHL

SEQ ID NO: 170870 - protein, 9 aa, Homo Sapiens
KIPNFCVLL

SEQ ID NO: 170871 - protein, 9 aa, Homo Sapiens
KIYEEPIIL

SEQ ID NO: 170872 - protein, 9 aa, Homo Sapiens
KQYGNEVFL

SEQ ID NO: 170873 - protein, 9 aa, Homo Sapiens
KSDPSIVRL

SEQ ID NO: 170874 - protein, 9 aa, Homo Sapiens
KSIKNVTEL

SEQ ID NO: 170875 - protein, 9 aa, Homo Sapiens
KSTSNITKL

SEQ ID NO: 170876 - protein, 9 aa, Homo Sapiens
KTPNFSTLL

SEQ ID NO: 170877 - protein, 9 aa, Homo Sapiens
LAAFVPLLL

SEQ ID NO: 170878 - protein, 9 aa, Homo Sapiens
LAAGHLVQL

SEQ ID NO: 170879 - protein, 9 aa, Homo Sapiens
LAAHIPLFL

SEQ ID NO: 170880 - protein, 9 aa, Homo Sapiens
LAAKKAVWL

SEQ ID NO: 170881 - protein, 9 aa, Homo Sapiens
LAAPQLIML

SEQ ID NO: 170882 - protein, 9 aa, Homo Sapiens
LAAPVISVL

SEQ ID NO: 170883 - protein, 9 aa, Homo Sapiens
LAARLVTFL

SEQ ID NO: 170884 - protein, 9 aa, Homo Sapiens
LAASVFTCL

SEQ ID NO: 170885 - protein, 9 aa, Homo Sapiens
LADKNVPNL

SEQ ID NO: 170886 - protein, 9 aa, Homo Sapiens
LADSKEIFL

SEQ ID NO: 170887 - protein, 9 aa, Homo Sapiens
LAFEGPILL

SEQ ID NO: 170888 - protein, 9 aa, Homo Sapiens
LAFPGEMLL

SEQ ID NO: 170889 - protein, 9 aa, Homo Sapiens
LAFPSPEKL

SEQ ID NO: 170890 - protein, 9 aa, Homo Sapiens
LAFSRALEL

SEQ ID NO: 170891 - protein, 9 aa, Homo Sapiens
LAFSRPSQL

SEQ ID NO: 170892 - protein, 9 aa, Homo Sapiens
LAIASGIYL

SEQ ID NO: 170893 - protein, 9 aa, Homo Sapiens
LAIFVICQL

SEQ ID NO: 170894 - protein, 9 aa, Homo Sapiens
LAITDEILL

SEQ ID NO: 170895 - protein, 9 aa, Homo Sapiens
LALLHLLYL

SEQ ID NO: 170896 - protein, 9 aa, Homo Sapiens
LALLLPVFL

SEQ ID NO: 170897 - protein, 9 aa, Homo Sapiens
LASSYIAHL

SEQ ID NO: 170898 - protein, 9 aa, Homo Sapiens
LATASSPKF

SEQ ID NO: 170899 - protein, 9 aa, Homo Sapiens
LATRAIPEL

SEQ ID NO: 170900 - protein, 9 aa, Homo Sapiens
LATRSFPQL

SEQ ID NO: 170901 - protein, 9 aa, Homo Sapiens
LAVAHPLLL

SEQ ID NO: 170902 - protein, 9 aa, Homo Sapiens
LAVLHTVLL

SEQ ID NO: 170903 - protein, 9 aa, Homo Sapiens
LAVRVVTLL

SEQ ID NO: 170904 - protein, 9 aa, Homo Sapiens
LAYEKIAYL

SEQ ID NO: 170905 - protein, 9 aa, Homo Sapiens
LAYHLAVVL

SEQ ID NO: 170906 - protein, 9 aa, Homo Sapiens
LAYIHLIEF

SEQ ID NO: 170907 - protein, 9 aa, Homo Sapiens
LAYPFQSLL

SEQ ID NO: 170908 - protein, 9 aa, Homo Sapiens
LAYSEPCGL

SEQ ID NO: 170909 - protein, 9 aa, Homo Sapiens
LAYTGFVKL

SEQ ID NO: 170910 - protein, 9 aa, Homo Sapiens
LAYYGFTKL

SEQ ID NO: 170911 - protein, 9 aa, Homo Sapiens
LGTAFMLWL

SEQ ID NO: 170912 - protein, 9 aa, Homo Sapiens
LISKIPHIL

SEQ ID NO: 170913 - protein, 9 aa, Homo Sapiens
LIYGRPVYV

SEQ ID NO: 170914 - protein, 9 aa, Homo Sapiens
LQYSFPLQL

SEQ ID NO: 170915 - protein, 9 aa, Homo Sapiens
LSDTRTRYL

SEQ ID NO: 170916 - protein, 9 aa, Homo Sapiens
LTDQTLIYL

SEQ ID NO: 170917 - protein, 9 aa, Homo Sapiens
LTPYRVIFL

SEQ ID NO: 170918 - protein, 9 aa, Homo Sapiens
LVIGRVLEL

SEQ ID NO: 170919 - protein, 9 aa, Homo Sapiens
LVTHLVTKL

SEQ ID NO: 170920 - protein, 9 aa, Homo Sapiens
MADPNIRFL

SEQ ID NO: 170921 - protein, 9 aa, Homo Sapiens
MAINSISKL

SEQ ID NO: 170922 - protein, 9 aa, Homo Sapiens
MANGAVIHL

SEQ ID NO: 170923 - protein, 9 aa, Homo Sapiens
MAPHWAVWL

SEQ ID NO: 170924 - protein, 9 aa, Homo Sapiens
MAVRLVTEL

SEQ ID NO: 170925 - protein, 9 aa, Homo Sapiens
MAYARQIYI

SEQ ID NO: 170926 - protein, 9 aa, Homo Sapiens
NADPIAKYL

SEQ ID NO: 170927 - protein, 9 aa, Homo Sapiens
NAFSGVMML

SEQ ID NO: 170928 - protein, 9 aa, Homo Sapiens
NASEHIVYL

SEQ ID NO: 170929 - protein, 9 aa, Homo Sapiens
NATIRVTNL

SEQ ID NO: 170930 - protein, 9 aa, Homo Sapiens
NAVCKLTYL

SEQ ID NO: 170931 - protein, 9 aa, Homo Sapiens
NAVSQITRM

SEQ ID NO: 170932 - protein, 9 aa, Homo Sapiens
NAVSVHSNL

SEQ ID NO: 170933 - protein, 9 aa, Homo Sapiens
NAYTGIVLL

SEQ ID NO: 170934 - protein, 9 aa, Homo Sapiens
NSPEKACSL

SEQ ID NO: 170935 - protein, 9 aa, Homo Sapiens
NVPVRDIPA

SEQ ID NO: 170936 - protein, 9 aa, Homo Sapiens
PLYARPIFL

SEQ ID NO: 170937 - protein, 9 aa, Homo Sapiens
QAFPRITQL

SEQ ID NO: 170938 - protein, 9 aa, Homo Sapiens
QAITALAHL

SEQ ID NO: 170939 - protein, 9 aa, Homo Sapiens
QASHQPLYL

SEQ ID NO: 170940 - protein, 9 aa, Homo Sapiens
QIPEIKQTL

SEQ ID NO: 170941 - protein, 9 aa, Homo Sapiens
QSAPAPVML

SEQ ID NO: 170942 - protein, 9 aa, Homo Sapiens
QSIAFISRL

SEQ ID NO: 170943 - protein, 9 aa, Homo Sapiens
QSYGNVVEL

SEQ ID NO: 170944 - protein, 9 aa, Homo Sapiens
QTIALITYL

SEQ ID NO: 170945 - protein, 9 aa, Homo Sapiens
QTYFFPIHL

SEQ ID NO: 170946 - protein, 9 aa, Homo Sapiens
RAADVLVYL

SEQ ID NO: 170947 - protein, 9 aa, Homo Sapiens
RAAPHRISL

SEQ ID NO: 170948 - protein, 9 aa, Homo Sapiens
RAAPPPLFL

SEQ ID NO: 170949 - protein, 9 aa, Homo Sapiens
RAASKTVRL

SEQ ID NO: 170950 - protein, 9 aa, Homo Sapiens
RAFDHVLHL

SEQ ID NO: 170951 - protein, 9 aa, Homo Sapiens
RALDHYLTL

SEQ ID NO: 170952 - protein, 9 aa, Homo Sapiens
RALEHFTDL

SEQ ID NO: 170953 - protein, 9 aa, Homo Sapiens
RAMKHPLGL

SEQ ID NO: 170954 - protein, 9 aa, Homo Sapiens
RAQGRVLRL

SEQ ID NO: 170955 - protein, 9 aa, Homo Sapiens
RATPHPSEL

SEQ ID NO: 170956 - protein, 9 aa, Homo Sapiens
RAVGVQNYL

SEQ ID NO: 170957 - protein, 9 aa, Homo Sapiens
RAVHILTKL

SEQ ID NO: 170958 - protein, 9 aa, Homo Sapiens
RAVNDYPSL

SEQ ID NO: 170959 - protein, 9 aa, Homo Sapiens
RAYDGTTYL

SEQ ID NO: 170960 - protein, 9 aa, Homo Sapiens
RAYQCVVLL

SEQ ID NO: 170961 - protein, 9 aa, Homo Sapiens
RAYTSETYL

SEQ ID NO: 170962 - protein, 9 aa, Homo Sapiens
RIPSFVTEL

SEQ ID NO: 170963 - protein, 9 aa, Homo Sapiens
RISNPPILL

SEQ ID NO: 170964 - protein, 9 aa, Homo Sapiens
RIYGNKTEL

SEQ ID NO: 170965 - protein, 9 aa, Homo Sapiens
RIYQKKTQL

SEQ ID NO: 170966 - protein, 9 aa, Homo Sapiens
RSHYSPIYL

SEQ ID NO: 170967 - protein, 9 aa, Homo Sapiens
RSLPFPTVL

SEQ ID NO: 170968 - protein, 9 aa, Homo Sapiens
RSYWKEVLL

SEQ ID NO: 170969 - protein, 9 aa, Homo Sapiens
RTIGVITKL

SEQ ID NO: 170970 - protein, 9 aa, Homo Sapiens
RVVDLITNL

SEQ ID NO: 170971 - protein, 9 aa, Homo Sapiens
RVVDNPIYL

SEQ ID NO: 170972 - protein, 9 aa, Homo Sapiens
RVYPKCTWL

SEQ ID NO: 170973 - protein, 9 aa, Homo Sapiens
SAAASPVHL

SEQ ID NO: 170974 - protein, 9 aa, Homo Sapiens
SAAGLPVCL

SEQ ID NO: 170975 - protein, 9 aa, Homo Sapiens
SAAGVLIKL

SEQ ID NO: 170976 - protein, 9 aa, Homo Sapiens
SAALSCTFL

SEQ ID NO: 170977 - protein, 9 aa, Homo Sapiens
SAAMGGILL

SEQ ID NO: 170978 - protein, 9 aa, Homo Sapiens
SAAMVFSAL

SEQ ID NO: 170979 - protein, 9 aa, Homo Sapiens
SAAPGTASL

SEQ ID NO: 170980 - protein, 9 aa, Homo Sapiens
SAAPRTVAL

SEQ ID NO: 170981 - protein, 9 aa, Homo Sapiens
SAAPSPAAL

SEQ ID NO: 170982 - protein, 9 aa, Homo Sapiens
SAAPSPQKL

SEQ ID NO: 170983 - protein, 9 aa, Homo Sapiens
SAAPTFLLL

SEQ ID NO: 170984 - protein, 9 aa, Homo Sapiens
SAAPVAHLL

SEQ ID NO: 170985 - protein, 9 aa, Homo Sapiens
SAATKIVFL

SEQ ID NO: 170986 - protein, 9 aa, Homo Sapiens
SACDGIFHL

SEQ ID NO: 170987 - protein, 9 aa, Homo Sapiens
SACGHTAVL

SEQ ID NO: 170988 - protein, 9 aa, Homo Sapiens
SADKFQVLL

SEQ ID NO: 170989 - protein, 9 aa, Homo Sapiens
SADPEARRL

SEQ ID NO: 170990 - protein, 9 aa, Homo Sapiens
SADPNVVDL

SEQ ID NO: 170991 - protein, 9 aa, Homo Sapiens
SADPRHILL

SEQ ID NO: 170992 - protein, 9 aa, Homo Sapiens
SADSRIAEL

SEQ ID NO: 170993 - protein, 9 aa, Homo Sapiens
SAFGGAARL

SEQ ID NO: 170994 - protein, 9 aa, Homo Sapiens
SAFLHAIRL

SEQ ID NO: 170995 - protein, 9 aa, Homo Sapiens
SAFLSAIFL

SEQ ID NO: 170996 - protein, 9 aa, Homo Sapiens
SAFNEITKL

SEQ ID NO: 170997 - protein, 9 aa, Homo Sapiens
SAFRGVGLL

SEQ ID NO: 170998 - protein, 9 aa, Homo Sapiens
SAIDRIFTL

SEQ ID NO: 170999 - protein, 9 aa, Homo Sapiens
SAIGLPVCL

SEQ ID NO: 171000 - protein, 9 aa, Homo Sapiens
SAIGVLAFL

SEQ ID NO: 171001 - protein, 9 aa, Homo Sapiens
SAIGYIHSL

SEQ ID NO: 171002 - protein, 9 aa, Homo Sapiens
SAIHTIAHL

SEQ ID NO: 171003 - protein, 9 aa, Homo Sapiens
SAIIVASYL

SEQ ID NO: 171004 - protein, 9 aa, Homo Sapiens
SAIQGVALL

SEQ ID NO: 171005 - protein, 9 aa, Homo Sapiens
SAIQLVSCL

SEQ ID NO: 171006 - protein, 9 aa, Homo Sapiens
SAKERPIWL

SEQ ID NO: 171007 - protein, 9 aa, Homo Sapiens
SAKSWPIFL

SEQ ID NO: 171008 - protein, 9 aa, Homo Sapiens
SALEFLTQL

SEQ ID NO: 171009 - protein, 9 aa, Homo Sapiens
SALGHLSFL

SEQ ID NO: 171010 - protein, 9 aa, Homo Sapiens
SALGSQAHL

SEQ ID NO: 171011 - protein, 9 aa, Homo Sapiens
SALPFITYL

SEQ ID NO: 171012 - protein, 9 aa, Homo Sapiens
SALSAPTLL

SEQ ID NO: 171013 - protein, 9 aa, Homo Sapiens
SAMAVVSRL

SEQ ID NO: 171014 - protein, 9 aa, Homo Sapiens
SANDGFVRL

SEQ ID NO: 171015 - protein, 9 aa, Homo Sapiens
SAPTETHSL

SEQ ID NO: 171016 - protein, 9 aa, Homo Sapiens
SAQGKPLAL

SEQ ID NO: 171017 - protein, 9 aa, Homo Sapiens
SASAAEVLL

SEQ ID NO: 171018 - protein, 9 aa, Homo Sapiens
SASASSPKL

SEQ ID NO: 171019 - protein, 9 aa, Homo Sapiens
SASNSFSRL

SEQ ID NO: 171020 - protein, 9 aa, Homo Sapiens
SASPSVAQL

SEQ ID NO: 171021 - protein, 9 aa, Homo Sapiens
SATEALLWL

SEQ ID NO: 171022 - protein, 9 aa, Homo Sapiens
SATGTVSDL

SEQ ID NO: 171023 - protein, 9 aa, Homo Sapiens
SATICLAYL

SEQ ID NO: 171024 - protein, 9 aa, Homo Sapiens
SATIVIAYL

SEQ ID NO: 171025 - protein, 9 aa, Homo Sapiens
SATPRPLHL

SEQ ID NO: 171026 - protein, 9 aa, Homo Sapiens
SATQVFPRL

SEQ ID NO: 171027 - protein, 9 aa, Homo Sapiens
SATQVYTIL

SEQ ID NO: 171028 - protein, 9 aa, Homo Sapiens
SATRVYIVL

SEQ ID NO: 171029 - protein, 9 aa, Homo Sapiens
SAVAVCSFL

SEQ ID NO: 171030 - protein, 9 aa, Homo Sapiens
SAVENLLLL

SEQ ID NO: 171031 - protein, 9 aa, Homo Sapiens
SAVFMVTRL

SEQ ID NO: 171032 - protein, 9 aa, Homo Sapiens
SAVGKTSFL

SEQ ID NO: 171033 - protein, 9 aa, Homo Sapiens
SAVPCALLL

SEQ ID NO: 171034 - protein, 9 aa, Homo Sapiens
SAVTPVTIL

SEQ ID NO: 171035 - protein, 9 aa, Homo Sapiens
SAVTRLLIL

SEQ ID NO: 171036 - protein, 9 aa, Homo Sapiens
SAVTTTAHL

SEQ ID NO: 171037 - protein, 9 aa, Homo Sapiens
SAYEFVTWL

SEQ ID NO: 171038 - protein, 9 aa, Homo Sapiens
SAYGAAAHL

SEQ ID NO: 171039 - protein, 9 aa, Homo Sapiens
SAYKELTDL

SEQ ID NO: 171040 - protein, 9 aa, Homo Sapiens
SGAPHAILL

SEQ ID NO: 171041 - protein, 9 aa, Homo Sapiens
SGFGGITML

SEQ ID NO: 171042 - protein, 9 aa, Homo Sapiens
SGFSGVIRL

SEQ ID NO: 171043 - protein, 9 aa, Homo Sapiens
SGISRLTWL

SEQ ID NO: 171044 - protein, 9 aa, Homo Sapiens
SGLTHVTSL

SEQ ID NO: 171045 - protein, 9 aa, Homo Sapiens
SGPGPAAAL

SEQ ID NO: 171046 - protein, 9 aa, Homo Sapiens
SGVKKPIYL

SEQ ID NO: 171047 - protein, 9 aa, Homo Sapiens
SIADRPLYL

SEQ ID NO: 171048 - protein, 9 aa, Homo Sapiens
SIIALCTHL

SEQ ID NO: 171049 - protein, 9 aa, Homo Sapiens
SIPDFPMHL

SEQ ID NO: 171050 - protein, 9 aa, Homo Sapiens
SIYRVPLLL

SEQ ID NO: 171051 - protein, 9 aa, Homo Sapiens
SIYSRFVQL

SEQ ID NO: 171052 - protein, 9 aa, Homo Sapiens
SLAHRPVRL

SEQ ID NO: 171053 - protein, 9 aa, Homo Sapiens
SLYPHFTLL

SEQ ID NO: 171054 - protein, 9 aa, Homo Sapiens
SNYSHVIFL

SEQ ID NO: 171055 - protein, 9 aa, Homo Sapiens
SQVPFPSRL

SEQ ID NO: 171056 - protein, 9 aa, Homo Sapiens
SQYPFPVTL

SEQ ID NO: 171057 - protein, 9 aa, Homo Sapiens
SSHARPVSL

SEQ ID NO: 171058 - protein, 9 aa, Homo Sapiens
SSHGGEIFL

SEQ ID NO: 171059 - protein, 9 aa, Homo Sapiens
SSHGNPILL

SEQ ID NO: 171060 - protein, 9 aa, Homo Sapiens
SSIEHLTTL

SEQ ID NO: 171061 - protein, 9 aa, Homo Sapiens
SSSPNIMLL

SEQ ID NO: 171062 - protein, 9 aa, Homo Sapiens
SSVATITRL

SEQ ID NO: 171063 - protein, 9 aa, Homo Sapiens
SSVATVVYL

SEQ ID NO: 171064 - protein, 9 aa, Homo Sapiens
SSVGKVSVL

SEQ ID NO: 171065 - protein, 9 aa, Homo Sapiens
SSVTKVLLL

SEQ ID NO: 171066 - protein, 9 aa, Homo Sapiens
SSYKEVTEL

SEQ ID NO: 171067 - protein, 9 aa, Homo Sapiens
SSYPGKTAL

SEQ ID NO: 171068 - protein, 9 aa, Homo Sapiens
SSYYGVVRL

SEQ ID NO: 171069 - protein, 9 aa, Homo Sapiens
STIRLLTSL

SEQ ID NO: 171070 - protein, 9 aa, Homo Sapiens
STPQHPLLL

SEQ ID NO: 171071 - protein, 9 aa, Homo Sapiens
SVISVVSYL

SEQ ID NO: 171072 - protein, 9 aa, Homo Sapiens
SVYSGCLHL

SEQ ID NO: 171073 - protein, 9 aa, Homo Sapiens
TAAGGTVHL

SEQ ID NO: 171074 - protein, 9 aa, Homo Sapiens
TAAGKEVML

SEQ ID NO: 171075 - protein, 9 aa, Homo Sapiens
TAAPSASLL

SEQ ID NO: 171076 - protein, 9 aa, Homo Sapiens
TAAPSPLRL

SEQ ID NO: 171077 - protein, 9 aa, Homo Sapiens
TAAPSPSLL

SEQ ID NO: 171078 - protein, 9 aa, Homo Sapiens
TAAPTVCLL

SEQ ID NO: 171079 - protein, 9 aa, Homo Sapiens
TAAPVPTTL

SEQ ID NO: 171080 - protein, 9 aa, Homo Sapiens
TADAIARKL

SEQ ID NO: 171081 - protein, 9 aa, Homo Sapiens
TADGRVVKL

SEQ ID NO: 171082 - protein, 9 aa, Homo Sapiens
TAFPEASFL

SEQ ID NO: 171083 - protein, 9 aa, Homo Sapiens
TAIREISLL

SEQ ID NO: 171084 - protein, 9 aa, Homo Sapiens
TALENPVLL

SEQ ID NO: 171085 - protein, 9 aa, Homo Sapiens
TALERPSFL

SEQ ID NO: 171086 - protein, 9 aa, Homo Sapiens
TALGKLLYL

SEQ ID NO: 171087 - protein, 9 aa, Homo Sapiens
TALHIACYL

SEQ ID NO: 171088 - protein, 9 aa, Homo Sapiens
TAMEQPVFL

SEQ ID NO: 171089 - protein, 9 aa, Homo Sapiens
TAPQGNVDL

SEQ ID NO: 171090 - protein, 9 aa, Homo Sapiens
TATEQWIFL

SEQ ID NO: 171091 - protein, 9 aa, Homo Sapiens
TAVRWVVTL

SEQ ID NO: 171092 - protein, 9 aa, Homo Sapiens
TAYAYATVL

SEQ ID NO: 171093 - protein, 9 aa, Homo Sapiens
TAYRNITEL

SEQ ID NO: 171094 - protein, 9 aa, Homo Sapiens
TAYWKELSL

SEQ ID NO: 171095 - protein, 9 aa, Homo Sapiens
TITQAVIFI

SEQ ID NO: 171096 - protein, 9 aa, Homo Sapiens
TSIHHATHL

SEQ ID NO: 171097 - protein, 9 aa, Homo Sapiens
TSLSALTQL

SEQ ID NO: 171098 - protein, 9 aa, Homo Sapiens
TSYPDPILL

SEQ ID NO: 171099 - protein, 9 aa, Homo Sapiens
TTPDHPLFL

SEQ ID NO: 171100 - protein, 9 aa, Homo Sapiens
TVFERPTFL

SEQ ID NO: 171101 - protein, 9 aa, Homo Sapiens
VAAFVCTYL

SEQ ID NO: 171102 - protein, 9 aa, Homo Sapiens
VAAGVLCEL

SEQ ID NO: 171103 - protein, 9 aa, Homo Sapiens
VAANKAVHL

SEQ ID NO: 171104 - protein, 9 aa, Homo Sapiens
VAASNIVQM

SEQ ID NO: 171105 - protein, 9 aa, Homo Sapiens
VADEGICYL

SEQ ID NO: 171106 - protein, 9 aa, Homo Sapiens
VADGYPVRL

SEQ ID NO: 171107 - protein, 9 aa, Homo Sapiens
VADKKARLI

SEQ ID NO: 171108 - protein, 9 aa, Homo Sapiens
VADNLAIQL

SEQ ID NO: 171109 - protein, 9 aa, Homo Sapiens
VADPTPFHI

SEQ ID NO: 171110 - protein, 9 aa, Homo Sapiens
VADPYVVIM

SEQ ID NO: 171111 - protein, 9 aa, Homo Sapiens
VAFPLLTKL

SEQ ID NO: 171112 - protein, 9 aa, Homo Sapiens
VAFSPVTEL

SEQ ID NO: 171113 - protein, 9 aa, Homo Sapiens
VAHGGVQKL

SEQ ID NO: 171114 - protein, 9 aa, Homo Sapiens
VAHGKQLFL

SEQ ID NO: 171115 - protein, 9 aa, Homo Sapiens
VAHSPPEKL

SEQ ID NO: 171116 - protein, 9 aa, Homo Sapiens
VAHSPPSTL

SEQ ID NO: 171117 - protein, 9 aa, Homo Sapiens
VAIGFKTKL

SEQ ID NO: 171118 - protein, 9 aa, Homo Sapiens
VAIGNPVHL

SEQ ID NO: 171119 - protein, 9 aa, Homo Sapiens
VAISSLTYL

SEQ ID NO: 171120 - protein, 9 aa, Homo Sapiens
VAITRVANL

SEQ ID NO: 171121 - protein, 9 aa, Homo Sapiens
VALPASGWL

SEQ ID NO: 171122 - protein, 9 aa, Homo Sapiens
VALSQIVRL

SEQ ID NO: 171123 - protein, 9 aa, Homo Sapiens
VAPGKDLTK

SEQ ID NO: 171124 - protein, 9 aa, Homo Sapiens
VAQKKASFL

SEQ ID NO: 171125 - protein, 9 aa, Homo Sapiens
VASEYPVIL

SEQ ID NO: 171126 - protein, 9 aa, Homo Sapiens
VASVIVTKL

SEQ ID NO: 171127 - protein, 9 aa, Homo Sapiens
VATKIFQEL

SEQ ID NO: 171128 - protein, 9 aa, Homo Sapiens
VATSVLTQM

SEQ ID NO: 171129 - protein, 9 aa, Homo Sapiens
VATVVPTHL

SEQ ID NO: 171130 - protein, 9 aa, Homo Sapiens
VAVAEVIKL

SEQ ID NO: 171131 - protein, 9 aa, Homo Sapiens
VAVGHGSDL

SEQ ID NO: 171132 - protein, 9 aa, Homo Sapiens
VAVGVYARL

SEQ ID NO: 171133 - protein, 9 aa, Homo Sapiens
VAVKRAVML

SEQ ID NO: 171134 - protein, 9 aa, Homo Sapiens
VAVQHFSLL

SEQ ID NO: 171135 - protein, 9 aa, Homo Sapiens
VAYDNAVNL

SEQ ID NO: 171136 - protein, 9 aa, Homo Sapiens
VAYFGLTTL

SEQ ID NO: 171137 - protein, 9 aa, Homo Sapiens
VAYGKGTYF

SEQ ID NO: 171138 - protein, 9 aa, Homo Sapiens
VAYGLHELL

SEQ ID NO: 171139 - protein, 9 aa, Homo Sapiens
VAYKFPELL

SEQ ID NO: 171140 - protein, 9 aa, Homo Sapiens
VAYPGIPKL

SEQ ID NO: 171141 - protein, 9 aa, Homo Sapiens
VAYWRQAGL

SEQ ID NO: 171142 - protein, 9 aa, Homo Sapiens
VGAGAPVYL

SEQ ID NO: 171143 - protein, 9 aa, Homo Sapiens
VGAGAPVYM

SEQ ID NO: 171144 - protein, 9 aa, Homo Sapiens
VGVNNPVFL

SEQ ID NO: 171145 - protein, 9 aa, Homo Sapiens
VGYDGPIYM

SEQ ID NO: 171146 - protein, 9 aa, Homo Sapiens
VGYHKHITL

SEQ ID NO: 171147 - protein, 9 aa, Homo Sapiens
VIIERLLLL

SEQ ID NO: 171148 - protein, 9 aa, Homo Sapiens
VIPESVILL

SEQ ID NO: 171149 - protein, 9 aa, Homo Sapiens
VIPGHLIFL

SEQ ID NO: 171150 - protein, 9 aa, Homo Sapiens
VSIDTVTVL

SEQ ID NO: 171151 - protein, 9 aa, Homo Sapiens
VSLGHISML

SEQ ID NO: 171152 - protein, 9 aa, Homo Sapiens
VSYVRSVYL

SEQ ID NO: 171153 - protein, 9 aa, Homo Sapiens
VTIGHIALL

SEQ ID NO: 171154 - protein, 9 aa, Homo Sapiens
VTYGFPIML

SEQ ID NO: 171155 - protein, 9 aa, Homo Sapiens
VTYPGELLL

SEQ ID NO: 171156 - protein, 9 aa, Homo Sapiens
VVPDHPVLL

SEQ ID NO: 171157 - protein, 9 aa, Homo Sapiens
VVYGGISRL

SEQ ID NO: 171158 - protein, 9 aa, Homo Sapiens
WAVALPVYL

SEQ ID NO: 171159 - protein, 9 aa, Homo Sapiens
WAVPQPTRL

SEQ ID NO: 171160 - protein, 9 aa, Homo Sapiens
WAYPRQVFI

SEQ ID NO: 171161 - protein, 9 aa, Homo Sapiens
WGYPHPFLI

SEQ ID NO: 171162 - protein, 9 aa, Homo Sapiens
YAADNQIYI

SEQ ID NO: 171163 - protein, 9 aa, Homo Sapiens
YAAGVHSVL

SEQ ID NO: 171164 - protein, 9 aa, Homo Sapiens
YAAPHFFHL

SEQ ID NO: 171165 - protein, 9 aa, Homo Sapiens
YAAQAHLKL

SEQ ID NO: 171166 - protein, 9 aa, Homo Sapiens
YAASAIGYL

SEQ ID NO: 171167 - protein, 9 aa, Homo Sapiens
YACAQSSKL

SEQ ID NO: 171168 - protein, 9 aa, Homo Sapiens
YACEKEVFL

SEQ ID NO: 171169 - protein, 9 aa, Homo Sapiens
YACGFSVLL

SEQ ID NO: 171170 - protein, 9 aa, Homo Sapiens
YADPSILYI

SEQ ID NO: 171171 - protein, 9 aa, Homo Sapiens
YADSSIAEL

SEQ ID NO: 171172 - protein, 9 aa, Homo Sapiens
YAFGGGCEL

SEQ ID NO: 171173 - protein, 9 aa, Homo Sapiens
YAFPKAVSV

SEQ ID NO: 171174 - protein, 9 aa, Homo Sapiens
YAFPKSITV

SEQ ID NO: 171175 - protein, 9 aa, Homo Sapiens
YAFPLAHSL

SEQ ID NO: 171176 - protein, 9 aa, Homo Sapiens
YAFSGVEEL

SEQ ID NO: 171177 - protein, 9 aa, Homo Sapiens
YAFVRPVIL

SEQ ID NO: 171178 - protein, 9 aa, Homo Sapiens
YAIGLVMRL

SEQ ID NO: 171179 - protein, 9 aa, Homo Sapiens
YAISKPDIL

SEQ ID NO: 171180 - protein, 9 aa, Homo Sapiens
YAISKPEVL

SEQ ID NO: 171181 - protein, 9 aa, Homo Sapiens
YAITRVLRL

SEQ ID NO: 171182 - protein, 9 aa, Homo Sapiens
YALDLSTFL

SEQ ID NO: 171183 - protein, 9 aa, Homo Sapiens
YALGALNHL

SEQ ID NO: 171184 - protein, 9 aa, Homo Sapiens
YALLGRTLL

SEQ ID NO: 171185 - protein, 9 aa, Homo Sapiens
YANSKAVTL

SEQ ID NO: 171186 - protein, 9 aa, Homo Sapiens
YASPDLSKL

SEQ ID NO: 171187 - protein, 9 aa, Homo Sapiens
YATTGKCEL

SEQ ID NO: 171188 - protein, 9 aa, Homo Sapiens
YAVGGYTRL

SEQ ID NO: 171189 - protein, 9 aa, Homo Sapiens
YAYAAQNLL

SEQ ID NO: 171190 - protein, 9 aa, Homo Sapiens
YAYEAVEQL

SEQ ID NO: 171191 - protein, 9 aa, Homo Sapiens
YAYFNFPEL

SEQ ID NO: 171192 - protein, 9 aa, Homo Sapiens
YAYLKAIVL

SEQ ID NO: 171193 - protein, 9 aa, Homo Sapiens
YAYPGVLLI

SEQ ID NO: 171194 - protein, 9 aa, Homo Sapiens
YAYRDAVFL

SEQ ID NO: 171195 - protein, 9 aa, Homo Sapiens
YAYTGRLEL

SEQ ID NO: 171196 - protein, 9 aa, Homo Sapiens
YGAGIVLRL

SEQ ID NO: 171197 - protein, 9 aa, Homo Sapiens
YGAPTAVRL

SEQ ID NO: 171198 - protein, 9 aa, Homo Sapiens
YGIENEVFL

SEQ ID NO: 171199 - protein, 9 aa, Homo Sapiens
YGLPVVVKL

SEQ ID NO: 171200 - protein, 9 aa, Homo Sapiens
YGYEHILTL

SEQ ID NO: 171201 - protein, 9 aa, Homo Sapiens
YGYGHESEL

SEQ ID NO: 171202 - protein, 9 aa, Homo Sapiens
YGYGSTVRL

SEQ ID NO: 171203 - protein, 9 aa, Homo Sapiens
YGYSKLIEL

SEQ ID NO: 171204 - protein, 9 aa, Homo Sapiens
YIFSHILRL

SEQ ID NO: 171205 - protein, 9 aa, Homo Sapiens
YIIPVVLFL

SEQ ID NO: 171206 - protein, 9 aa, Homo Sapiens
YIPDFLTLL

SEQ ID NO: 171207 - protein, 9 aa, Homo Sapiens
YIPNKVLIL

SEQ ID NO: 171208 - protein, 9 aa, Homo Sapiens
YIVDLLTHL

SEQ ID NO: 171209 - protein, 9 aa, Homo Sapiens
YIYHGTVKL

SEQ ID NO: 171210 - protein, 9 aa, Homo Sapiens
YLADIFTKL

SEQ ID NO: 171211 - protein, 9 aa, Homo Sapiens
YLIARVMLL

SEQ ID NO: 171212 - protein, 9 aa, Homo Sapiens
YLLDLHSYL

SEQ ID NO: 171213 - protein, 9 aa, Homo Sapiens
YLPSFFTKL

SEQ ID NO: 171214 - protein, 9 aa, Homo Sapiens
YLVPRAVLL

SEQ ID NO: 171215 - protein, 9 aa, Homo Sapiens
YLYFSSTKL

SEQ ID NO: 171216 - protein, 9 aa, Homo Sapiens
YLYPDITRL

SEQ ID NO: 171217 - protein, 9 aa, Homo Sapiens
YMIAHITGL

SEQ ID NO: 171218 - protein, 9 aa, Homo Sapiens
YMIDNVILL

SEQ ID NO: 171219 - protein, 9 aa, Homo Sapiens
YQIDTVINL

SEQ ID NO: 171220 - protein, 9 aa, Homo Sapiens
YQILVVTRL

SEQ ID NO: 171221 - protein, 9 aa, Homo Sapiens
YQVDSRTYL

SEQ ID NO: 171222 - protein, 9 aa, Homo Sapiens
YQYGAVVTL

SEQ ID NO: 171223 - protein, 9 aa, Homo Sapiens
YQYLLVTAL

SEQ ID NO: 171224 - protein, 9 aa, Homo Sapiens
YQYPRPLLI

SEQ ID NO: 171225 - protein, 9 aa, Homo Sapiens
YQYPVIIHL

SEQ ID NO: 171226 - protein, 9 aa, Homo Sapiens
YSAPVIHVL

SEQ ID NO: 171227 - protein, 9 aa, Homo Sapiens
YSDPRFLNL

SEQ ID NO: 171228 - protein, 9 aa, Homo Sapiens
YSHPGVVFL

SEQ ID NO: 171229 - protein, 9 aa, Homo Sapiens
YSLDHISSL

SEQ ID NO: 171230 - protein, 9 aa, Homo Sapiens
YSLPNAPTL

SEQ ID NO: 171231 - protein, 9 aa, Homo Sapiens
YSSDTTPLL

SEQ ID NO: 171232 - protein, 9 aa, Homo Sapiens
YSVETVTLL

SEQ ID NO: 171233 - protein, 9 aa, Homo Sapiens
YSYSKGTYL

SEQ ID NO: 171234 - protein, 9 aa, Homo Sapiens
YSYYGPLNL

SEQ ID NO: 171235 - protein, 9 aa, Homo Sapiens
YTAPTAIRL

SEQ ID NO: 171236 - protein, 9 aa, Homo Sapiens
YTCPVITNL

SEQ ID NO: 171237 - protein, 9 aa, Homo Sapiens
YTIPLAIKL

SEQ ID NO: 171238 - protein, 9 aa, Homo Sapiens
YTSRIVVRL

SEQ ID NO: 171239 - protein, 9 aa, Homo Sapiens
YVAPKAVWL

SEQ ID NO: 171240 - protein, 9 aa, Homo Sapiens
YVAPRRILL

SEQ ID NO: 171241 - protein, 9 aa, Homo Sapiens
YVFPGVTRL

SEQ ID NO: 171242 - protein, 9 aa, Homo Sapiens
YVGSRPIKL

SEQ ID NO: 171243 - protein, 9 aa, Homo Sapiens
YVINVTTHL

SEQ ID NO: 171244 - protein, 9 aa, Homo Sapiens
YVVPYMIHL

SEQ ID NO: 171245 - protein, 9 aa, Homo Sapiens
YVVPYTIHL

SEQ ID NO: 171246 - protein, 9 aa, Homo Sapiens
YVYKNVSQL

SEQ ID NO: 171247 - protein, 10 aa, Homo Sapiens
AAAPVPTTTL

SEQ ID NO: 171248 - protein, 10 aa, Homo Sapiens
AAFPGASLYL

SEQ ID NO: 171249 - protein, 10 aa, Homo Sapiens
AAINPELLQL

SEQ ID NO: 171250 - protein, 10 aa, Homo Sapiens
DSYQKFIPFI

SEQ ID NO: 171251 - protein, 10 aa, Homo Sapiens
FAAPSPFAEL

SEQ ID NO: 171252 - protein, 10 aa, Homo Sapiens
FAAPTTGNQI

SEQ ID NO: 171253 - protein, 10 aa, Homo Sapiens
FADGHVLELL

SEQ ID NO: 171254 - protein, 10 aa, Homo Sapiens
FAFESDLHSL

SEQ ID NO: 171255 - protein, 10 aa, Homo Sapiens
FAIDSSHPWL

SEQ ID NO: 171256 - protein, 10 aa, Homo Sapiens
FAIVASDTRL

SEQ ID NO: 171257 - protein, 10 aa, Homo Sapiens
FASPTSPPVL

SEQ ID NO: 171258 - protein, 10 aa, Homo Sapiens
GALGGRALLL

SEQ ID NO: 171259 - protein, 10 aa, Homo Sapiens
GAYDHSYVEL

SEQ ID NO: 171260 - protein, 10 aa, Homo Sapiens
GPVYPHPVLL

SEQ ID NO: 171261 - protein, 10 aa, Homo Sapiens
KITPLEIEVL

SEQ ID NO: 171262 - protein, 10 aa, Homo Sapiens
SITDVYLLNL

SEQ ID NO: 171263 - protein, 10 aa, Homo Sapiens
SLYQSKYEEL

SEQ ID NO: 171264 - protein, 10 aa, Homo Sapiens
VAYHGSYLWL

SEQ ID NO: 171265 - protein, 10 aa, Homo Sapiens
VSAAGLVQGL

SEQ ID NO: 171266 - protein, 10 aa, Homo Sapiens
YAFGRVFSGL

SEQ ID NO: 171267 - protein, 10 aa, Homo Sapiens
YAIPTVCVGL

SEQ ID NO: 171268 - protein, 10 aa, Homo Sapiens
YALCGFGGVL

SEQ ID NO: 171269 - protein, 10 aa, Homo Sapiens
YAVDRAITHL

SEQ ID NO: 171270 - protein, 10 aa, Homo Sapiens
YAVPSAGLRL

SEQ ID NO: 171271 - protein, 10 aa, Homo Sapiens
YIADPNIAKL

SEQ ID NO: 171272 - protein, 10 aa, Homo Sapiens
YLYGQTTTYL

SEQ ID NO: 171273 - protein, 11 aa, Homo Sapiens
AAFTADPLSLL

SEQ ID NO: 171274 - protein, 11 aa, Homo Sapiens
AALAANSNGIA

SEQ ID NO: 171275 - protein, 11 aa, Homo Sapiens
AEQRGELAIKD

SEQ ID NO: 171276 - protein, 11 aa, Homo Sapiens
FAFEGIGDEDL

SEQ ID NO: 171277 - protein, 11 aa, Homo Sapiens
FAFESDLHSLL

SEQ ID NO: 171278 - protein, 11 aa, Homo Sapiens
FAYDGKDYIAL

SEQ ID NO: 171279 - protein, 11 aa, Homo Sapiens
FAYDGKDYLTL

SEQ ID NO: 171280 - protein, 11 aa, Homo Sapiens
FAYDPSNYEYL

SEQ ID NO: 171281 - protein, 11 aa, Homo Sapiens
YAYETKDALCL

SEQ ID NO: 171282 - protein, 8 aa, Homo Sapiens
AIASGIYL

SEQ ID NO: 171283 - protein, 8 aa, Homo Sapiens
AIIGPILL

SEQ ID NO: 171284 - protein, 8 aa, Homo Sapiens
ASPPPLLL

SEQ ID NO: 171285 - protein, 8 aa, Homo Sapiens
EEQLQQIR

SEQ ID NO: 171286 - protein, 8 aa, Homo Sapiens
EIADPIVL

SEQ ID NO: 171287 - protein, 8 aa, Homo Sapiens
HRPPPIKL

SEQ ID NO: 171288 - protein, 8 aa, Homo Sapiens
IIAKKIVL

SEQ ID NO: 171289 - protein, 8 aa, Homo Sapiens
IMPKDIQL

SEQ ID NO: 171290 - protein, 8 aa, Homo Sapiens
IQEAIALI

SEQ ID NO: 171291 - protein, 8 aa, Homo Sapiens
ITKTGAKL

SEQ ID NO: 171292 - protein, 8 aa, Homo Sapiens
KFIEGVVL

SEQ ID NO: 171293 - protein, 8 aa, Homo Sapiens
KIADPFVL

SEQ ID NO: 171294 - protein, 8 aa, Homo Sapiens
KIAEANKL

SEQ ID NO: 171295 - protein, 8 aa, Homo Sapiens
KIHEPIML

SEQ ID NO: 171296 - protein, 8 aa, Homo Sapiens
KIPSPVKL

SEQ ID NO: 171297 - protein, 8 aa, Homo Sapiens
KKPDSVSL

SEQ ID NO: 171298 - protein, 8 aa, Homo Sapiens
KKPTPIQL

SEQ ID NO: 171299 - protein, 8 aa, Homo Sapiens
KMPLPLKL

SEQ ID NO: 171300 - protein, 8 aa, Homo Sapiens
KQPTPVQL

SEQ ID NO: 171301 - protein, 8 aa, Homo Sapiens
KSPPPMNL

SEQ ID NO: 171302 - protein, 8 aa, Homo Sapiens
KTPSGIKL

SEQ ID NO: 171303 - protein, 8 aa, Homo Sapiens
KVPFPLTL

SEQ ID NO: 171304 - protein, 8 aa, Homo Sapiens
LKPPPIKL

SEQ ID NO: 171305 - protein, 8 aa, Homo Sapiens
LPKLYVKL

SEQ ID NO: 171306 - protein, 8 aa, Homo Sapiens
PLPPAVFL

SEQ ID NO: 171307 - protein, 8 aa, Homo Sapiens
QIAEAVRL

SEQ ID NO: 171308 - protein, 8 aa, Homo Sapiens
QIPAAVKL

SEQ ID NO: 171309 - protein, 8 aa, Homo Sapiens
RFPEALRL

SEQ ID NO: 171310 - protein, 8 aa, Homo Sapiens
RIIIPVLL

SEQ ID NO: 171311 - protein, 8 aa, Homo Sapiens
RIPEPVHL

SEQ ID NO: 171312 - protein, 8 aa, Homo Sapiens
RMPPPANL

SEQ ID NO: 171313 - protein, 8 aa, Homo Sapiens
SIAGPVLL

SEQ ID NO: 171314 - protein, 8 aa, Homo Sapiens
SIAVPIVL

SEQ ID NO: 171315 - protein, 8 aa, Homo Sapiens
SIPVGISL

SEQ ID NO: 171316 - protein, 8 aa, Homo Sapiens
TGPPPLLL

SEQ ID NO: 171317 - protein, 8 aa, Homo Sapiens
TIAEGLTL

SEQ ID NO: 171318 - protein, 8 aa, Homo Sapiens
TIPIAVAL

SEQ ID NO: 171319 - protein, 8 aa, Homo Sapiens
TIPLAVVL

SEQ ID NO: 171320 - protein, 8 aa, Homo Sapiens
TLIPAVVI

SEQ ID NO: 171321 - protein, 8 aa, Homo Sapiens
TLPTPMVL

SEQ ID NO: 171322 - protein, 8 aa, Homo Sapiens
VIGPPVVL

SEQ ID NO: 171323 - protein, 8 aa, Homo Sapiens
VRPKLPLL

SEQ ID NO: 171324 - protein, 9 aa, Homo Sapiens
AFPGASLYL

SEQ ID NO: 171325 - protein, 9 aa, Homo Sapiens
AFPKGSWTL

SEQ ID NO: 171326 - protein, 9 aa, Homo Sapiens
AGPDRFVVL

SEQ ID NO: 171327 - protein, 9 aa, Homo Sapiens
AGPPDTISL

SEQ ID NO: 171328 - protein, 9 aa, Homo Sapiens
AHPKAKLVL

SEQ ID NO: 171329 - protein, 9 aa, Homo Sapiens
AHPLETLIL

SEQ ID NO: 171330 - protein, 9 aa, Homo Sapiens
AIIKEPIDI

SEQ ID NO: 171331 - protein, 9 aa, Homo Sapiens
AIIRDRAAL

SEQ ID NO: 171332 - protein, 9 aa, Homo Sapiens
AIISQKPQL

SEQ ID NO: 171333 - protein, 9 aa, Homo Sapiens
AIPKKKMNL

SEQ ID NO: 171334 - protein, 9 aa, Homo Sapiens
AIPNARIEL

SEQ ID NO: 171335 - protein, 9 aa, Homo Sapiens
AITPAGINL

SEQ ID NO: 171336 - protein, 9 aa, Homo Sapiens
AIVAKQVLL

SEQ ID NO: 171337 - protein, 9 aa, Homo Sapiens
AIVGNKVDL

SEQ ID NO: 171338 - protein, 9 aa, Homo Sapiens
AIVNSALKL

SEQ ID NO: 171339 - protein, 9 aa, Homo Sapiens
ALIKDKILF

SEQ ID NO: 171340 - protein, 9 aa, Homo Sapiens
ALPKLPISL

SEQ ID NO: 171341 - protein, 9 aa, Homo Sapiens
ALVKEKLRL

SEQ ID NO: 171342 - protein, 9 aa, Homo Sapiens
ALVKHSVLL

SEQ ID NO: 171343 - protein, 9 aa, Homo Sapiens
ALVSGKLAL

SEQ ID NO: 171344 - protein, 9 aa, Homo Sapiens
AMILGKMVL

SEQ ID NO: 171345 - protein, 9 aa, Homo Sapiens
APLPPAVFL

SEQ ID NO: 171346 - protein, 9 aa, Homo Sapiens
AQPDGKIRL

SEQ ID NO: 171347 - protein, 9 aa, Homo Sapiens
AQPETPVTL

SEQ ID NO: 171348 - protein, 9 aa, Homo Sapiens
AQPVTAVAL

SEQ ID NO: 171349 - protein, 9 aa, Homo Sapiens
ARIAKGLRL

SEQ ID NO: 171350 - protein, 9 aa, Homo Sapiens
ARPMRAIFL

SEQ ID NO: 171351 - protein, 9 aa, Homo Sapiens
ASPTQPIQL

SEQ ID NO: 171352 - protein, 9 aa, Homo Sapiens
ATPKAKIYL

SEQ ID NO: 171353 - protein, 9 aa, Homo Sapiens
ATPLKKVIL

SEQ ID NO: 171354 - protein, 9 aa, Homo Sapiens
AVPTIYTKL

SEQ ID NO: 171355 - protein, 9 aa, Homo Sapiens
AVVHGKVAL

SEQ ID NO: 171356 - protein, 9 aa, Homo Sapiens
EIIDNHITL

SEQ ID NO: 171357 - protein, 9 aa, Homo Sapiens
EIIKQKLTL

SEQ ID NO: 171358 - protein, 9 aa, Homo Sapiens
EIISKGIKL

SEQ ID NO: 171359 - protein, 9 aa, Homo Sapiens
EIVPNGITL

SEQ ID NO: 171360 - protein, 9 aa, Homo Sapiens
GFPEGSVEL

SEQ ID NO: 171361 - protein, 9 aa, Homo Sapiens
GIPSNRIIL

SEQ ID NO: 171362 - protein, 9 aa, Homo Sapiens
GIVVSKPNL

SEQ ID NO: 171363 - protein, 9 aa, Homo Sapiens
GKLPKGILL

SEQ ID NO: 171364 - protein, 9 aa, Homo Sapiens
GQPRDGLKL

SEQ ID NO: 171365 - protein, 9 aa, Homo Sapiens
GVPKTHLEL

SEQ ID NO: 171366 - protein, 9 aa, Homo Sapiens
HAPRIPVTL

SEQ ID NO: 171367 - protein, 9 aa, Homo Sapiens
HFPGYVQDL

SEQ ID NO: 171368 - protein, 9 aa, Homo Sapiens
HFPHKPIIL

SEQ ID NO: 171369 - protein, 9 aa, Homo Sapiens
HGIQGKFSL

SEQ ID NO: 171370 - protein, 9 aa, Homo Sapiens
HGPAAKPTL

SEQ ID NO: 171371 - protein, 9 aa, Homo Sapiens
HGPNHPLVL

SEQ ID NO: 171372 - protein, 9 aa, Homo Sapiens
HGVKDKPVL

SEQ ID NO: 171373 - protein, 9 aa, Homo Sapiens
HHPDYNNEL

SEQ ID NO: 171374 - protein, 9 aa, Homo Sapiens
HIEPLKIQL

SEQ ID NO: 171375 - protein, 9 aa, Homo Sapiens
HINIGALEL

SEQ ID NO: 171376 - protein, 9 aa, Homo Sapiens
HITPDNFEL

SEQ ID NO: 171377 - protein, 9 aa, Homo Sapiens
HIVVNKAEL

SEQ ID NO: 171378 - protein, 9 aa, Homo Sapiens
HLIEESVKL

SEQ ID NO: 171379 - protein, 9 aa, Homo Sapiens
HLPDVCVNL

SEQ ID NO: 171380 - protein, 9 aa, Homo Sapiens
HLPNTYVDL

SEQ ID NO: 171381 - protein, 9 aa, Homo Sapiens
HLPPAKVLL

SEQ ID NO: 171382 - protein, 9 aa, Homo Sapiens
HQIDNHIHL

SEQ ID NO: 171383 - protein, 9 aa, Homo Sapiens
HQPTTWVSF

SEQ ID NO: 171384 - protein, 9 aa, Homo Sapiens
HSPGDYILL

SEQ ID NO: 171385 - protein, 9 aa, Homo Sapiens
HSPPNKPKL

SEQ ID NO: 171386 - protein, 9 aa, Homo Sapiens
HTPHQFLLL

SEQ ID NO: 171387 - protein, 9 aa, Homo Sapiens
HVPAVKLLL

SEQ ID NO: 171388 - protein, 9 aa, Homo Sapiens
HVPEHAVVL

SEQ ID NO: 171389 - protein, 9 aa, Homo Sapiens
HVPQQHFEL

SEQ ID NO: 171390 - protein, 9 aa, Homo Sapiens
HYPDFHQEL

SEQ ID NO: 171391 - protein, 9 aa, Homo Sapiens
IHPADSVYL

SEQ ID NO: 171392 - protein, 9 aa, Homo Sapiens
IIAENKIRL

SEQ ID NO: 171393 - protein, 9 aa, Homo Sapiens
ISPKEFVHL

SEQ ID NO: 171394 - protein, 9 aa, Homo Sapiens
ISPKHFVHL

SEQ ID NO: 171395 - protein, 9 aa, Homo Sapiens
ISPKVKMAL

SEQ ID NO: 171396 - protein, 9 aa, Homo Sapiens
ITPPEKFFL

SEQ ID NO: 171397 - protein, 9 aa, Homo Sapiens
IVPDGTLQL

SEQ ID NO: 171398 - protein, 9 aa, Homo Sapiens
IYPSIFHVL

SEQ ID NO: 171399 - protein, 9 aa, Homo Sapiens
KAPEMTNEL

SEQ ID NO: 171400 - protein, 9 aa, Homo Sapiens
KAPGFAQML

SEQ ID NO: 171401 - protein, 9 aa, Homo Sapiens
KAPGSTSNL

SEQ ID NO: 171402 - protein, 9 aa, Homo Sapiens
KAPLSKVRL

SEQ ID NO: 171403 - protein, 9 aa, Homo Sapiens
KAPPDGWEL

SEQ ID NO: 171404 - protein, 9 aa, Homo Sapiens
KAPPIPLKL

SEQ ID NO: 171405 - protein, 9 aa, Homo Sapiens
KAPVNTAEL

SEQ ID NO: 171406 - protein, 9 aa, Homo Sapiens
KAVGDGIVL

SEQ ID NO: 171407 - protein, 9 aa, Homo Sapiens
KEIEEKLRL

SEQ ID NO: 171408 - protein, 9 aa, Homo Sapiens
KEVQDGIEL

SEQ ID NO: 171409 - protein, 9 aa, Homo Sapiens
KFIDKQLEL

SEQ ID NO: 171410 - protein, 9 aa, Homo Sapiens
KFIPGKPVL

SEQ ID NO: 171411 - protein, 9 aa, Homo Sapiens
KFPAYERVL

SEQ ID NO: 171412 - protein, 9 aa, Homo Sapiens
KFPDSQNQL

SEQ ID NO: 171413 - protein, 9 aa, Homo Sapiens
KFPGIRPYL

SEQ ID NO: 171414 - protein, 9 aa, Homo Sapiens
KFPHESARL

SEQ ID NO: 171415 - protein, 9 aa, Homo Sapiens
KFPIVNAEL

SEQ ID NO: 171416 - protein, 9 aa, Homo Sapiens
KFPLMTLQL

SEQ ID NO: 171417 - protein, 9 aa, Homo Sapiens
KFPLTRPSL

SEQ ID NO: 171418 - protein, 9 aa, Homo Sapiens
KFPPKFVQL

SEQ ID NO: 171419 - protein, 9 aa, Homo Sapiens
KFPVKPADL

SEQ ID NO: 171420 - protein, 9 aa, Homo Sapiens
KFVNKSYLL

SEQ ID NO: 171421 - protein, 9 aa, Homo Sapiens
KFVVKKPEL

SEQ ID NO: 171422 - protein, 9 aa, Homo Sapiens
KGIGEFFRL

SEQ ID NO: 171423 - protein, 9 aa, Homo Sapiens
KGPAVGIDL

SEQ ID NO: 171424 - protein, 9 aa, Homo Sapiens
KGPDAASKL

SEQ ID NO: 171425 - protein, 9 aa, Homo Sapiens
KGPEDTAQL

SEQ ID NO: 171426 - protein, 9 aa, Homo Sapiens
KGPPAALTL

SEQ ID NO: 171427 - protein, 9 aa, Homo Sapiens
KGPYEYLTL

SEQ ID NO: 171428 - protein, 9 aa, Homo Sapiens
KGVAEKTVL

SEQ ID NO: 171429 - protein, 9 aa, Homo Sapiens
KGVIQRLTL

SEQ ID NO: 171430 - protein, 9 aa, Homo Sapiens
KHIRHKFFL

SEQ ID NO: 171431 - protein, 9 aa, Homo Sapiens
KHPATRTVL

SEQ ID NO: 171432 - protein, 9 aa, Homo Sapiens
KHPDASVNF

SEQ ID NO: 171433 - protein, 9 aa, Homo Sapiens
KHPDSSVNF

SEQ ID NO: 171434 - protein, 9 aa, Homo Sapiens
KHPKYCIEL

SEQ ID NO: 171435 - protein, 9 aa, Homo Sapiens
KHPVEVVYL

SEQ ID NO: 171436 - protein, 9 aa, Homo Sapiens
KIAGYVTHL

SEQ ID NO: 171437 - protein, 9 aa, Homo Sapiens
KIAIQKITL

SEQ ID NO: 171438 - protein, 9 aa, Homo Sapiens
KIAKESQFL

SEQ ID NO: 171439 - protein, 9 aa, Homo Sapiens
KIAKLGLKL

SEQ ID NO: 171440 - protein, 9 aa, Homo Sapiens
KIAKPLSSL

SEQ ID NO: 171441 - protein, 9 aa, Homo Sapiens
KIALEHPML

SEQ ID NO: 171442 - protein, 9 aa, Homo Sapiens
KIAPNTPQL

SEQ ID NO: 171443 - protein, 9 aa, Homo Sapiens
KIAPYSVEI

SEQ ID NO: 171444 - protein, 9 aa, Homo Sapiens
KIAQQAAKL

SEQ ID NO: 171445 - protein, 9 aa, Homo Sapiens
KIDDKPVKI

SEQ ID NO: 171446 - protein, 9 aa, Homo Sapiens
KIFQVAQEL

SEQ ID NO: 171447 - protein, 9 aa, Homo Sapiens
KIGNIKKTL

SEQ ID NO: 171448 - protein, 9 aa, Homo Sapiens
KIHAHKVVL

SEQ ID NO: 171449 - protein, 9 aa, Homo Sapiens
KIHPMAYQL

SEQ ID NO: 171450 - protein, 9 aa, Homo Sapiens
KIIASSPEM

SEQ ID NO: 171451 - protein, 9 aa, Homo Sapiens
KIIDGLLVM

SEQ ID NO: 171452 - protein, 9 aa, Homo Sapiens
KIIDSGPQL

SEQ ID NO: 171453 - protein, 9 aa, Homo Sapiens
KIIEARLKM

SEQ ID NO: 171454 - protein, 9 aa, Homo Sapiens
KIIEMMPEF

SEQ ID NO: 171455 - protein, 9 aa, Homo Sapiens
KIIHTRVNF

SEQ ID NO: 171456 - protein, 9 aa, Homo Sapiens
KIIKEKQAF

SEQ ID NO: 171457 - protein, 9 aa, Homo Sapiens
KIIKKPMDL

SEQ ID NO: 171458 - protein, 9 aa, Homo Sapiens
KIINGYIFL

SEQ ID NO: 171459 - protein, 9 aa, Homo Sapiens
KIIPTKIVY

SEQ ID NO: 171460 - protein, 9 aa, Homo Sapiens
KIISESAQM

SEQ ID NO: 171461 - protein, 9 aa, Homo Sapiens
KIITEGTKL

SEQ ID NO: 171462 - protein, 9 aa, Homo Sapiens
KIIYKLIRL

SEQ ID NO: 171463 - protein, 9 aa, Homo Sapiens
KILAEAAKL

SEQ ID NO: 171464 - protein, 9 aa, Homo Sapiens
KINEEKCNL

SEQ ID NO: 171465 - protein, 9 aa, Homo Sapiens
KINKKRIAL

SEQ ID NO: 171466 - protein, 9 aa, Homo Sapiens
KINSSAIKL

SEQ ID NO: 171467 - protein, 9 aa, Homo Sapiens
KIPAGAVSV

SEQ ID NO: 171468 - protein, 9 aa, Homo Sapiens
KIPAHRVVL

SEQ ID NO: 171469 - protein, 9 aa, Homo Sapiens
KIPALAVEM

SEQ ID NO: 171470 - protein, 9 aa, Homo Sapiens
KIPASAVEM

SEQ ID NO: 171471 - protein, 9 aa, Homo Sapiens
KIPDMSVQL

SEQ ID NO: 171472 - protein, 9 aa, Homo Sapiens
KIPEDILQL

SEQ ID NO: 171473 - protein, 9 aa, Homo Sapiens
KIPEYQQLL

SEQ ID NO: 171474 - protein, 9 aa, Homo Sapiens
KIPILGVHL

SEQ ID NO: 171475 - protein, 9 aa, Homo Sapiens
KIPKATPEL

SEQ ID NO: 171476 - protein, 9 aa, Homo Sapiens
KIPKAYIRF

SEQ ID NO: 171477 - protein, 9 aa, Homo Sapiens
KIPLVKVDM

SEQ ID NO: 171478 - protein, 9 aa, Homo Sapiens
KIPNFCVLL

SEQ ID NO: 171479 - protein, 9 aa, Homo Sapiens
KIPQVLVKL

SEQ ID NO: 171480 - protein, 9 aa, Homo Sapiens
KIPSENNKL

SEQ ID NO: 171481 - protein, 9 aa, Homo Sapiens
KIPTAKPEL

SEQ ID NO: 171482 - protein, 9 aa, Homo Sapiens
KIPTCKITL

SEQ ID NO: 171483 - protein, 9 aa, Homo Sapiens
KISKEKSFL

SEQ ID NO: 171484 - protein, 9 aa, Homo Sapiens
KISKSVTTL

SEQ ID NO: 171485 - protein, 9 aa, Homo Sapiens
KISSEKASL

SEQ ID NO: 171486 - protein, 9 aa, Homo Sapiens
KIVGNKWEA

SEQ ID NO: 171487 - protein, 9 aa, Homo Sapiens
KIVINKKQL

SEQ ID NO: 171488 - protein, 9 aa, Homo Sapiens
KIVKPGMKL

SEQ ID NO: 171489 - protein, 9 aa, Homo Sapiens
KIVPKSLLL

SEQ ID NO: 171490 - protein, 9 aa, Homo Sapiens
KIVQFIVTL

SEQ ID NO: 171491 - protein, 9 aa, Homo Sapiens
KIVSGKVRF

SEQ ID NO: 171492 - protein, 9 aa, Homo Sapiens
KKIPSPVKL

SEQ ID NO: 171493 - protein, 9 aa, Homo Sapiens
KKNPDSLEL

SEQ ID NO: 171494 - protein, 9 aa, Homo Sapiens
KKPEKPLIL

SEQ ID NO: 171495 - protein, 9 aa, Homo Sapiens
KKPPPVPAL

SEQ ID NO: 171496 - protein, 9 aa, Homo Sapiens
KKVKFQAKL

SEQ ID NO: 171497 - protein, 9 aa, Homo Sapiens
KKVSKAAIL

SEQ ID NO: 171498 - protein, 9 aa, Homo Sapiens
KLAPPLVTL

SEQ ID NO: 171499 - protein, 9 aa, Homo Sapiens
KLGISPLML

SEQ ID NO: 171500 - protein, 9 aa, Homo Sapiens
KLIAQNLEL

SEQ ID NO: 171501 - protein, 9 aa, Homo Sapiens
KLIEKNYFL

SEQ ID NO: 171502 - protein, 9 aa, Homo Sapiens
KLIHEKHLL

SEQ ID NO: 171503 - protein, 9 aa, Homo Sapiens
KLIKDGLII

SEQ ID NO: 171504 - protein, 9 aa, Homo Sapiens
KLILKGVIL

SEQ ID NO: 171505 - protein, 9 aa, Homo Sapiens
KLIPNAIQI

SEQ ID NO: 171506 - protein, 9 aa, Homo Sapiens
KLLKDKVKL

SEQ ID NO: 171507 - protein, 9 aa, Homo Sapiens
KLNATNIEL

SEQ ID NO: 171508 - protein, 9 aa, Homo Sapiens
KLNIPKVLL

SEQ ID NO: 171509 - protein, 9 aa, Homo Sapiens
KLPAFSPLM

SEQ ID NO: 171510 - protein, 9 aa, Homo Sapiens
KLPAGKNVL

SEQ ID NO: 171511 - protein, 9 aa, Homo Sapiens
KLPANHPLL

SEQ ID NO: 171512 - protein, 9 aa, Homo Sapiens
KLPDGTWNL

SEQ ID NO: 171513 - protein, 9 aa, Homo Sapiens
KLPDKTVEF

SEQ ID NO: 171514 - protein, 9 aa, Homo Sapiens
KLPEDIMKL

SEQ ID NO: 171515 - protein, 9 aa, Homo Sapiens
KLPKEREEL

SEQ ID NO: 171516 - protein, 9 aa, Homo Sapiens
KLPKGTVSF

SEQ ID NO: 171517 - protein, 9 aa, Homo Sapiens
KLPKKHMQL

SEQ ID NO: 171518 - protein, 9 aa, Homo Sapiens
KLPKQPVIV

SEQ ID NO: 171519 - protein, 9 aa, Homo Sapiens
KLPLMKINF

SEQ ID NO: 171520 - protein, 9 aa, Homo Sapiens
KLPPKRPEL

SEQ ID NO: 171521 - protein, 9 aa, Homo Sapiens
KLPPLPLTL

SEQ ID NO: 171522 - protein, 9 aa, Homo Sapiens
KLPQFCAHL

SEQ ID NO: 171523 - protein, 9 aa, Homo Sapiens
KLPQQREKL

SEQ ID NO: 171524 - protein, 9 aa, Homo Sapiens
KLPQRTAKL

SEQ ID NO: 171525 - protein, 9 aa, Homo Sapiens
KLPSGKLQV

SEQ ID NO: 171526 - protein, 9 aa, Homo Sapiens
KLPSPAHHL

SEQ ID NO: 171527 - protein, 9 aa, Homo Sapiens
KLPSVPTKL

SEQ ID NO: 171528 - protein, 9 aa, Homo Sapiens
KLPTEWNVL

SEQ ID NO: 171529 - protein, 9 aa, Homo Sapiens
KLPVESIQI

SEQ ID NO: 171530 - protein, 9 aa, Homo Sapiens
KLSVTKPVL

SEQ ID NO: 171531 - protein, 9 aa, Homo Sapiens
KLTELKAVL

SEQ ID NO: 171532 - protein, 9 aa, Homo Sapiens
KLVPRKDLL

SEQ ID NO: 171533 - protein, 9 aa, Homo Sapiens
KLVRDAFAL

SEQ ID NO: 171534 - protein, 9 aa, Homo Sapiens
KMAEIKVKL

SEQ ID NO: 171535 - protein, 9 aa, Homo Sapiens
KMASSRVTL

SEQ ID NO: 171536 - protein, 9 aa, Homo Sapiens
KMIGLKAKL

SEQ ID NO: 171537 - protein, 9 aa, Homo Sapiens
KMPACNIML

SEQ ID NO: 171538 - protein, 9 aa, Homo Sapiens
KMPDGSVAL

SEQ ID NO: 171539 - protein, 9 aa, Homo Sapiens
KMPDMHVNM

SEQ ID NO: 171540 - protein, 9 aa, Homo Sapiens
KMPFDANKL

SEQ ID NO: 171541 - protein, 9 aa, Homo Sapiens
KMPPLPVTL

SEQ ID NO: 171542 - protein, 9 aa, Homo Sapiens
KMPQYQKEL

SEQ ID NO: 171543 - protein, 9 aa, Homo Sapiens
KMSHKRIML

SEQ ID NO: 171544 - protein, 9 aa, Homo Sapiens
KMVRQILEL

SEQ ID NO: 171545 - protein, 9 aa, Homo Sapiens
KMVVDAVMM

SEQ ID NO: 171546 - protein, 9 aa, Homo Sapiens
KNIGNKVTL

SEQ ID NO: 171547 - protein, 9 aa, Homo Sapiens
KNIPMTLEL

SEQ ID NO: 171548 - protein, 9 aa, Homo Sapiens
KNPAFKPVL

SEQ ID NO: 171549 - protein, 9 aa, Homo Sapiens
KNPQKFTIL

SEQ ID NO: 171550 - protein, 9 aa, Homo Sapiens
KNTLNKVVL

SEQ ID NO: 171551 - protein, 9 aa, Homo Sapiens
KNVAKTIQL

SEQ ID NO: 171552 - protein, 9 aa, Homo Sapiens
KNVEKRALL

SEQ ID NO: 171553 - protein, 9 aa, Homo Sapiens
KNVTEHLKL

SEQ ID NO: 171554 - protein, 9 aa, Homo Sapiens
KQAAPPIEL

SEQ ID NO: 171555 - protein, 9 aa, Homo Sapiens
KQALDKLKL

SEQ ID NO: 171556 - protein, 9 aa, Homo Sapiens
KQAQEKFEL

SEQ ID NO: 171557 - protein, 9 aa, Homo Sapiens
KQIAEAVRL

SEQ ID NO: 171558 - protein, 9 aa, Homo Sapiens
KQMSEKIRL

SEQ ID NO: 171559 - protein, 9 aa, Homo Sapiens
KQPAEHLQL

SEQ ID NO: 171560 - protein, 9 aa, Homo Sapiens
KQPEDYFYL

SEQ ID NO: 171561 - protein, 9 aa, Homo Sapiens
KQPEEGLRL

SEQ ID NO: 171562 - protein, 9 aa, Homo Sapiens
KQPEEYHYL

SEQ ID NO: 171563 - protein, 9 aa, Homo Sapiens
KQPPPSIRL

SEQ ID NO: 171564 - protein, 9 aa, Homo Sapiens
KRPALPVQL

SEQ ID NO: 171565 - protein, 9 aa, Homo Sapiens
KRPDTTESL

SEQ ID NO: 171566 - protein, 9 aa, Homo Sapiens
KRPELGVTL

SEQ ID NO: 171567 - protein, 9 aa, Homo Sapiens
KRPFGVSLL

SEQ ID NO: 171568 - protein, 9 aa, Homo Sapiens
KRPGESLRI

SEQ ID NO: 171569 - protein, 9 aa, Homo Sapiens
KRPNAILKL

SEQ ID NO: 171570 - protein, 9 aa, Homo Sapiens
KRPVGGFLL

SEQ ID NO: 171571 - protein, 9 aa, Homo Sapiens
KSPAIFGVL

SEQ ID NO: 171572 - protein, 9 aa, Homo Sapiens
KSPAITATL

SEQ ID NO: 171573 - protein, 9 aa, Homo Sapiens
KSPATSCEL

SEQ ID NO: 171574 - protein, 9 aa, Homo Sapiens
KSPGFGLSL

SEQ ID NO: 171575 - protein, 9 aa, Homo Sapiens
KSPGHMVIL

SEQ ID NO: 171576 - protein, 9 aa, Homo Sapiens
KSPGTANVL

SEQ ID NO: 171577 - protein, 9 aa, Homo Sapiens
KSPKSYLEI

SEQ ID NO: 171578 - protein, 9 aa, Homo Sapiens
KSPNQSLRL

SEQ ID NO: 171579 - protein, 9 aa, Homo Sapiens
KSPQKSTVL

SEQ ID NO: 171580 - protein, 9 aa, Homo Sapiens
KSPSSKPSL

SEQ ID NO: 171581 - protein, 9 aa, Homo Sapiens
KSPTKSILL

SEQ ID NO: 171582 - protein, 9 aa, Homo Sapiens
KSSDFYITL

SEQ ID NO: 171583 - protein, 9 aa, Homo Sapiens
KSSVKAVIL

SEQ ID NO: 171584 - protein, 9 aa, Homo Sapiens
KSVKVKIKL

SEQ ID NO: 171585 - protein, 9 aa, Homo Sapiens
KTADKKLLL

SEQ ID NO: 171586 - protein, 9 aa, Homo Sapiens
KTADKKLNL

SEQ ID NO: 171587 - protein, 9 aa, Homo Sapiens
KTAQNHPML

SEQ ID NO: 171588 - protein, 9 aa, Homo Sapiens
KTIDGHINL

SEQ ID NO: 171589 - protein, 9 aa, Homo Sapiens
KTIHKYVHL

SEQ ID NO: 171590 - protein, 9 aa, Homo Sapiens
KTILDKVKL

SEQ ID NO: 171591 - protein, 9 aa, Homo Sapiens
KTLQKKCYL

SEQ ID NO: 171592 - protein, 9 aa, Homo Sapiens
KTPAEFAKL

SEQ ID NO: 171593 - protein, 9 aa, Homo Sapiens
KTPDSRPSL

SEQ ID NO: 171594 - protein, 9 aa, Homo Sapiens
KTPESKPTI

SEQ ID NO: 171595 - protein, 9 aa, Homo Sapiens
KTPESNIKM

SEQ ID NO: 171596 - protein, 9 aa, Homo Sapiens
KTPGDVLRL

SEQ ID NO: 171597 - protein, 9 aa, Homo Sapiens
KTPLKKFLL

SEQ ID NO: 171598 - protein, 9 aa, Homo Sapiens
KTPMENIGL

SEQ ID NO: 171599 - protein, 9 aa, Homo Sapiens
KTPNFSTLL

SEQ ID NO: 171600 - protein, 9 aa, Homo Sapiens
KTPPRVLTL

SEQ ID NO: 171601 - protein, 9 aa, Homo Sapiens
KTPQYKASL

SEQ ID NO: 171602 - protein, 9 aa, Homo Sapiens
KTSTQKFFL

SEQ ID NO: 171603 - protein, 9 aa, Homo Sapiens
KTTNAKVAL

SEQ ID NO: 171604 - protein, 9 aa, Homo Sapiens
KTVDQHMKL

SEQ ID NO: 171605 - protein, 9 aa, Homo Sapiens
KTVEQHLRL

SEQ ID NO: 171606 - protein, 9 aa, Homo Sapiens
KTVIGKARL

SEQ ID NO: 171607 - protein, 9 aa, Homo Sapiens
KTVNERITL

SEQ ID NO: 171608 - protein, 9 aa, Homo Sapiens
KTVPQKVTI

SEQ ID NO: 171609 - protein, 9 aa, Homo Sapiens
KTVQCKVTL

SEQ ID NO: 171610 - protein, 9 aa, Homo Sapiens
KVADSKTLL

SEQ ID NO: 171611 - protein, 9 aa, Homo Sapiens
KVAETAVQL

SEQ ID NO: 171612 - protein, 9 aa, Homo Sapiens
KVIAQQVQL

SEQ ID NO: 171613 - protein, 9 aa, Homo Sapiens
KVIDRKVEL

SEQ ID NO: 171614 - protein, 9 aa, Homo Sapiens
KVIEEAVYF

SEQ ID NO: 171615 - protein, 9 aa, Homo Sapiens
KVIEINPYL

SEQ ID NO: 171616 - protein, 9 aa, Homo Sapiens
KVIEKRYFL

SEQ ID NO: 171617 - protein, 9 aa, Homo Sapiens
KVISSNTSL

SEQ ID NO: 171618 - protein, 9 aa, Homo Sapiens
KVPAESPTL

SEQ ID NO: 171619 - protein, 9 aa, Homo Sapiens
KVPEKKLKL

SEQ ID NO: 171620 - protein, 9 aa, Homo Sapiens
KVPHDPVAL

SEQ ID NO: 171621 - protein, 9 aa, Homo Sapiens
KVPKERLAL

SEQ ID NO: 171622 - protein, 9 aa, Homo Sapiens
KVPKGALLL

SEQ ID NO: 171623 - protein, 9 aa, Homo Sapiens
KVPLQYNEL

SEQ ID NO: 171624 - protein, 9 aa, Homo Sapiens
KVPNQYTHL

SEQ ID NO: 171625 - protein, 9 aa, Homo Sapiens
KVPSTPVHL

SEQ ID NO: 171626 - protein, 9 aa, Homo Sapiens
KVPTFVRML

SEQ ID NO: 171627 - protein, 9 aa, Homo Sapiens
KVVAKGLGL

SEQ ID NO: 171628 - protein, 9 aa, Homo Sapiens
KVVDDTLEL

SEQ ID NO: 171629 - protein, 9 aa, Homo Sapiens
KVVGKDYLL

SEQ ID NO: 171630 - protein, 9 aa, Homo Sapiens
KVVKLHTKL

SEQ ID NO: 171631 - protein, 9 aa, Homo Sapiens
KVVSQYHEL

SEQ ID NO: 171632 - protein, 9 aa, Homo Sapiens
KVVSQYSSL

SEQ ID NO: 171633 - protein, 9 aa, Homo Sapiens
KVVTRHPDL

SEQ ID NO: 171634 - protein, 9 aa, Homo Sapiens
KVVVHPLVL

SEQ ID NO: 171635 - protein, 9 aa, Homo Sapiens
KWPETPLLL

SEQ ID NO: 171636 - protein, 9 aa, Homo Sapiens
KYIDKTIRV

SEQ ID NO: 171637 - protein, 9 aa, Homo Sapiens
KYIDQKFVL

SEQ ID NO: 171638 - protein, 9 aa, Homo Sapiens
KYIGENLQL

SEQ ID NO: 171639 - protein, 9 aa, Homo Sapiens
KYIHSANVL

SEQ ID NO: 171640 - protein, 9 aa, Homo Sapiens
KYIKEAVRL

SEQ ID NO: 171641 - protein, 9 aa, Homo Sapiens
KYPASTVQI

SEQ ID NO: 171642 - protein, 9 aa, Homo Sapiens
KYPDNQVKL

SEQ ID NO: 171643 - protein, 9 aa, Homo Sapiens
KYPENFFLL

SEQ ID NO: 171644 - protein, 9 aa, Homo Sapiens
KYPFIPLLL

SEQ ID NO: 171645 - protein, 9 aa, Homo Sapiens
KYPHYFPLL

SEQ ID NO: 171646 - protein, 9 aa, Homo Sapiens
KYPHYFPVM

SEQ ID NO: 171647 - protein, 9 aa, Homo Sapiens
KYPPSATTL

SEQ ID NO: 171648 - protein, 9 aa, Homo Sapiens
KYPQAIYTL

SEQ ID NO: 171649 - protein, 9 aa, Homo Sapiens
KYPTLPGKL

SEQ ID NO: 171650 - protein, 9 aa, Homo Sapiens
KYPVGVHFL

SEQ ID NO: 171651 - protein, 9 aa, Homo Sapiens
KYPVHIYRL

SEQ ID NO: 171652 - protein, 9 aa, Homo Sapiens
KYPYVAVML

SEQ ID NO: 171653 - protein, 9 aa, Homo Sapiens
KYVQDNIQL

SEQ ID NO: 171654 - protein, 9 aa, Homo Sapiens
LAPQNKPEL

SEQ ID NO: 171655 - protein, 9 aa, Homo Sapiens
LHKARHVLE

SEQ ID NO: 171656 - protein, 9 aa, Homo Sapiens
LIIGKKFKL

SEQ ID NO: 171657 - protein, 9 aa, Homo Sapiens
LIPCKKFDL

SEQ ID NO: 171658 - protein, 9 aa, Homo Sapiens
LIVDRPVTL

SEQ ID NO: 171659 - protein, 9 aa, Homo Sapiens
LLPNGKLIL

SEQ ID NO: 171660 - protein, 9 aa, Homo Sapiens
LMPGSTLVL

SEQ ID NO: 171661 - protein, 9 aa, Homo Sapiens
LMPPTKPFL

SEQ ID NO: 171662 - protein, 9 aa, Homo Sapiens
LQINDKIAL

SEQ ID NO: 171663 - protein, 9 aa, Homo Sapiens
LQPKQPLRL

SEQ ID NO: 171664 - protein, 9 aa, Homo Sapiens
LRRPLLHEL

SEQ ID NO: 171665 - protein, 9 aa, Homo Sapiens
LSLLKSHPK

SEQ ID NO: 171666 - protein, 9 aa, Homo Sapiens
LSPKEFYEL

SEQ ID NO: 171667 - protein, 9 aa, Homo Sapiens
LSPKSYYEL

SEQ ID NO: 171668 - protein, 9 aa, Homo Sapiens
LSPTNYHFL

SEQ ID NO: 171669 - protein, 9 aa, Homo Sapiens
LYPDHFHLL

SEQ ID NO: 171670 - protein, 9 aa, Homo Sapiens
LYPSGTLKL

SEQ ID NO: 171671 - protein, 9 aa, Homo Sapiens
MAPRTLFLL

SEQ ID NO: 171672 - protein, 9 aa, Homo Sapiens
MFPEMSIHL

SEQ ID NO: 171673 - protein, 9 aa, Homo Sapiens
MILNKALLL

SEQ ID NO: 171674 - protein, 9 aa, Homo Sapiens
MLPPKKFVL

SEQ ID NO: 171675 - protein, 9 aa, Homo Sapiens
MQIVHKITL

SEQ ID NO: 171676 - protein, 9 aa, Homo Sapiens
MQPFNYVTL

SEQ ID NO: 171677 - protein, 9 aa, Homo Sapiens
MQPTHPIRL

SEQ ID NO: 171678 - protein, 9 aa, Homo Sapiens
MRPRKAFLL

SEQ ID NO: 171679 - protein, 9 aa, Homo Sapiens
MSPNSYIKL

SEQ ID NO: 171680 - protein, 9 aa, Homo Sapiens
NIIAKKIVL

SEQ ID NO: 171681 - protein, 9 aa, Homo Sapiens
NIPAGKPSL

SEQ ID NO: 171682 - protein, 9 aa, Homo Sapiens
NIPEKKLIL

SEQ ID NO: 171683 - protein, 9 aa, Homo Sapiens
NQPKERLVL

SEQ ID NO: 171684 - protein, 9 aa, Homo Sapiens
NQVKGKPDL

SEQ ID NO: 171685 - protein, 9 aa, Homo Sapiens
NYPDEFTKL

SEQ ID NO: 171686 - protein, 9 aa, Homo Sapiens
PLAPAPVFI

SEQ ID NO: 171687 - protein, 9 aa, Homo Sapiens
QFPGGSIDL

SEQ ID NO: 171688 - protein, 9 aa, Homo Sapiens
QFVKDSIRL

SEQ ID NO: 171689 - protein, 9 aa, Homo Sapiens
QGPPERVVL

SEQ ID NO: 171690 - protein, 9 aa, Homo Sapiens
QGPSRHVYL

SEQ ID NO: 171691 - protein, 9 aa, Homo Sapiens
QIIHQKPKL

SEQ ID NO: 171692 - protein, 9 aa, Homo Sapiens
QIPENGLTL

SEQ ID NO: 171693 - protein, 9 aa, Homo Sapiens
QIPVSKMLL

SEQ ID NO: 171694 - protein, 9 aa, Homo Sapiens
QIVKEKVHL

SEQ ID NO: 171695 - protein, 9 aa, Homo Sapiens
QKPSYYVRL

SEQ ID NO: 171696 - protein, 9 aa, Homo Sapiens
QLIAKKIKL

SEQ ID NO: 171697 - protein, 9 aa, Homo Sapiens
QLIEKRLNL

SEQ ID NO: 171698 - protein, 9 aa, Homo Sapiens
QLISKAIHL

SEQ ID NO: 171699 - protein, 9 aa, Homo Sapiens
QLPLVKPYL

SEQ ID NO: 171700 - protein, 9 aa, Homo Sapiens
QLPYNGVVL

SEQ ID NO: 171701 - protein, 9 aa, Homo Sapiens
QMPKVHIEF

SEQ ID NO: 171702 - protein, 9 aa, Homo Sapiens
QRPETAATL

SEQ ID NO: 171703 - protein, 9 aa, Homo Sapiens
QSINKKLEL

SEQ ID NO: 171704 - protein, 9 aa, Homo Sapiens
QTIINKFEL

SEQ ID NO: 171705 - protein, 9 aa, Homo Sapiens
QVIKEKLRL

SEQ ID NO: 171706 - protein, 9 aa, Homo Sapiens
RAIQKKIDL

SEQ ID NO: 171707 - protein, 9 aa, Homo Sapiens
RAPAEFIRF

SEQ ID NO: 171708 - protein, 9 aa, Homo Sapiens
RAPAQNPEL

SEQ ID NO: 171709 - protein, 9 aa, Homo Sapiens
RAPPPPPLL

SEQ ID NO: 171710 - protein, 9 aa, Homo Sapiens
RCIKETLRL

SEQ ID NO: 171711 - protein, 9 aa, Homo Sapiens
RFPDENFKL

SEQ ID NO: 171712 - protein, 9 aa, Homo Sapiens
RFPDENFTL

SEQ ID NO: 171713 - protein, 9 aa, Homo Sapiens
RFPDGTNGL

SEQ ID NO: 171714 - protein, 9 aa, Homo Sapiens
RFPFSRPEL

SEQ ID NO: 171715 - protein, 9 aa, Homo Sapiens
RFPHDKLLL

SEQ ID NO: 171716 - protein, 9 aa, Homo Sapiens
RFPHHDNEL

SEQ ID NO: 171717 - protein, 9 aa, Homo Sapiens
RFPKAPSKL

SEQ ID NO: 171718 - protein, 9 aa, Homo Sapiens
RFPNFTNQL

SEQ ID NO: 171719 - protein, 9 aa, Homo Sapiens
RFPTQHQRL

SEQ ID NO: 171720 - protein, 9 aa, Homo Sapiens
RGPAHKLAL

SEQ ID NO: 171721 - protein, 9 aa, Homo Sapiens
RGPGWRPLL

SEQ ID NO: 171722 - protein, 9 aa, Homo Sapiens
RGPLAKIWL

SEQ ID NO: 171723 - protein, 9 aa, Homo Sapiens
RGPLKCVKL

SEQ ID NO: 171724 - protein, 9 aa, Homo Sapiens
RGPPARVTL

SEQ ID NO: 171725 - protein, 9 aa, Homo Sapiens
RGPPQRPKL

SEQ ID NO: 171726 - protein, 9 aa, Homo Sapiens
RGPRDCVVL

SEQ ID NO: 171727 - protein, 9 aa, Homo Sapiens
RGVDNKIRL

SEQ ID NO: 171728 - protein, 9 aa, Homo Sapiens
RHPAATAQL

SEQ ID NO: 171729 - protein, 9 aa, Homo Sapiens
RHPASSVAL

SEQ ID NO: 171730 - protein, 9 aa, Homo Sapiens
RHPKYKTEL

SEQ ID NO: 171731 - protein, 9 aa, Homo Sapiens
RHPREVVIL

SEQ ID NO: 171732 - protein, 9 aa, Homo Sapiens
RHPSQTVEL

SEQ ID NO: 171733 - protein, 9 aa, Homo Sapiens
RIAEFTTNL

SEQ ID NO: 171734 - protein, 9 aa, Homo Sapiens
RIAEYAFKL

SEQ ID NO: 171735 - protein, 9 aa, Homo Sapiens
RIAGEASRL

SEQ ID NO: 171736 - protein, 9 aa, Homo Sapiens
RIAPRPYRL

SEQ ID NO: 171737 - protein, 9 aa, Homo Sapiens
RIAQLRFLL

SEQ ID NO: 171738 - protein, 9 aa, Homo Sapiens
RIEKNPARL

SEQ ID NO: 171739 - protein, 9 aa, Homo Sapiens
RIHDKAVAL

SEQ ID NO: 171740 - protein, 9 aa, Homo Sapiens
RIIAHAQLL

SEQ ID NO: 171741 - protein, 9 aa, Homo Sapiens
RIIKETQRL

SEQ ID NO: 171742 - protein, 9 aa, Homo Sapiens
RIIPRHLQL

SEQ ID NO: 171743 - protein, 9 aa, Homo Sapiens
RIIQDRVSL

SEQ ID NO: 171744 - protein, 9 aa, Homo Sapiens
RIIRKVVKL

SEQ ID NO: 171745 - protein, 9 aa, Homo Sapiens
RIISGHIDL

SEQ ID NO: 171746 - protein, 9 aa, Homo Sapiens
RIMEFTTTL

SEQ ID NO: 171747 - protein, 9 aa, Homo Sapiens
RIPAHRFVL

SEQ ID NO: 171748 - protein, 9 aa, Homo Sapiens
RIPATPVVI

SEQ ID NO: 171749 - protein, 9 aa, Homo Sapiens
RIPDRPYSL

SEQ ID NO: 171750 - protein, 9 aa, Homo Sapiens
RIPKEQGVL

SEQ ID NO: 171751 - protein, 9 aa, Homo Sapiens
RIPNRGIDL

SEQ ID NO: 171752 - protein, 9 aa, Homo Sapiens
RIPPVAVRL

SEQ ID NO: 171753 - protein, 9 aa, Homo Sapiens
RIPQARALL

SEQ ID NO: 171754 - protein, 9 aa, Homo Sapiens
RIPQEKCIL

SEQ ID NO: 171755 - protein, 9 aa, Homo Sapiens
RIPSFVTEL

SEQ ID NO: 171756 - protein, 9 aa, Homo Sapiens
RIPTISTQL

SEQ ID NO: 171757 - protein, 9 aa, Homo Sapiens
RISNPPILL

SEQ ID NO: 171758 - protein, 9 aa, Homo Sapiens
RITPRHLQL

SEQ ID NO: 171759 - protein, 9 aa, Homo Sapiens
RITTEKMLL

SEQ ID NO: 171760 - protein, 9 aa, Homo Sapiens
RIVDVRPTL

SEQ ID NO: 171761 - protein, 9 aa, Homo Sapiens
RIVPEPVQF

SEQ ID NO: 171762 - protein, 9 aa, Homo Sapiens
RIVPGAVSV

SEQ ID NO: 171763 - protein, 9 aa, Homo Sapiens
RIVVEHIIM

SEQ ID NO: 171764 - protein, 9 aa, Homo Sapiens
RKIKGVIEL

SEQ ID NO: 171765 - protein, 9 aa, Homo Sapiens
RKPDNYMTL

SEQ ID NO: 171766 - protein, 9 aa, Homo Sapiens
RKPDSKIVL

SEQ ID NO: 171767 - protein, 9 aa, Homo Sapiens
RKPPEVVRL

SEQ ID NO: 171768 - protein, 9 aa, Homo Sapiens
RKPPTSIRL

SEQ ID NO: 171769 - protein, 9 aa, Homo Sapiens
RKVKGNLIL

SEQ ID NO: 171770 - protein, 9 aa, Homo Sapiens
RLAQEAVTL

SEQ ID NO: 171771 - protein, 9 aa, Homo Sapiens
RLHLPPVRL

SEQ ID NO: 171772 - protein, 9 aa, Homo Sapiens
RLIAQRYLL

SEQ ID NO: 171773 - protein, 9 aa, Homo Sapiens
RLIERKSDL

SEQ ID NO: 171774 - protein, 9 aa, Homo Sapiens
RLINQVLEL

SEQ ID NO: 171775 - protein, 9 aa, Homo Sapiens
RLLKSKLYL

SEQ ID NO: 171776 - protein, 9 aa, Homo Sapiens
RLPAWQPIL

SEQ ID NO: 171777 - protein, 9 aa, Homo Sapiens
RLPDEKVEL

SEQ ID NO: 171778 - protein, 9 aa, Homo Sapiens
RLPDGRVVL

SEQ ID NO: 171779 - protein, 9 aa, Homo Sapiens
RLPDQFSKL

SEQ ID NO: 171780 - protein, 9 aa, Homo Sapiens
RLPEIYIQL

SEQ ID NO: 171781 - protein, 9 aa, Homo Sapiens
RLPEPTTRL

SEQ ID NO: 171782 - protein, 9 aa, Homo Sapiens
RLPHSTAAL

SEQ ID NO: 171783 - protein, 9 aa, Homo Sapiens
RLPKDFVDL

SEQ ID NO: 171784 - protein, 9 aa, Homo Sapiens
RLPPHLIAL

SEQ ID NO: 171785 - protein, 9 aa, Homo Sapiens
RLPPPFPGL

SEQ ID NO: 171786 - protein, 9 aa, Homo Sapiens
RLPPYSSQL

SEQ ID NO: 171787 - protein, 9 aa, Homo Sapiens
RLPQYQTDL

SEQ ID NO: 171788 - protein, 9 aa, Homo Sapiens
RLPRETLAF

SEQ ID NO: 171789 - protein, 9 aa, Homo Sapiens
RLPSGKVGF

SEQ ID NO: 171790 - protein, 9 aa, Homo Sapiens
RLPSRVLEL

SEQ ID NO: 171791 - protein, 9 aa, Homo Sapiens
RLVAMAVKL

SEQ ID NO: 171792 - protein, 9 aa, Homo Sapiens
RLVESKVEL

SEQ ID NO: 171793 - protein, 9 aa, Homo Sapiens
RLVEVKPSL

SEQ ID NO: 171794 - protein, 9 aa, Homo Sapiens
RLVKEYTVL

SEQ ID NO: 171795 - protein, 9 aa, Homo Sapiens
RLVPFLVEL

SEQ ID NO: 171796 - protein, 9 aa, Homo Sapiens
RMIKPRIVL

SEQ ID NO: 171797 - protein, 9 aa, Homo Sapiens
RMPAEIVVL

SEQ ID NO: 171798 - protein, 9 aa, Homo Sapiens
RMPCHKPYL

SEQ ID NO: 171799 - protein, 9 aa, Homo Sapiens
RMPDCSVAL

SEQ ID NO: 171800 - protein, 9 aa, Homo Sapiens
RMPDGPVAL

SEQ ID NO: 171801 - protein, 9 aa, Homo Sapiens
RMPRCGIRL

SEQ ID NO: 171802 - protein, 9 aa, Homo Sapiens
RMTEDALRL

SEQ ID NO: 171803 - protein, 9 aa, Homo Sapiens
RMVASKMEL

SEQ ID NO: 171804 - protein, 9 aa, Homo Sapiens
RNIKNKVMV

SEQ ID NO: 171805 - protein, 9 aa, Homo Sapiens
RNIKNKVVV

SEQ ID NO: 171806 - protein, 9 aa, Homo Sapiens
RNIVKKFLM

SEQ ID NO: 171807 - protein, 9 aa, Homo Sapiens
RNPKNYLSL

SEQ ID NO: 171808 - protein, 9 aa, Homo Sapiens
RNPQSYLYL

SEQ ID NO: 171809 - protein, 9 aa, Homo Sapiens
RQIKDRVTM

SEQ ID NO: 171810 - protein, 9 aa, Homo Sapiens
RQIPWKLGL

SEQ ID NO: 171811 - protein, 9 aa, Homo Sapiens
RQPDLVLRL

SEQ ID NO: 171812 - protein, 9 aa, Homo Sapiens
RQPEFRAVL

SEQ ID NO: 171813 - protein, 9 aa, Homo Sapiens
RQPNPPLIL

SEQ ID NO: 171814 - protein, 9 aa, Homo Sapiens
RQPPESLKL

SEQ ID NO: 171815 - protein, 9 aa, Homo Sapiens
RQPPPRPFL

SEQ ID NO: 171816 - protein, 9 aa, Homo Sapiens
RQPYAVSEL

SEQ ID NO: 171817 - protein, 9 aa, Homo Sapiens
RQVDSHVEL

SEQ ID NO: 171818 - protein, 9 aa, Homo Sapiens
RQVPKCLVL

SEQ ID NO: 171819 - protein, 9 aa, Homo Sapiens
RRIQFPIEM

SEQ ID NO: 171820 - protein, 9 aa, Homo Sapiens
RRPNCGIRL

SEQ ID NO: 171821 - protein, 9 aa, Homo Sapiens
RRPYVRVEL

SEQ ID NO: 171822 - protein, 9 aa, Homo Sapiens
RRVEETLKL

SEQ ID NO: 171823 - protein, 9 aa, Homo Sapiens
RSIFDHIKL

SEQ ID NO: 171824 - protein, 9 aa, Homo Sapiens
RSPDRNLLL

SEQ ID NO: 171825 - protein, 9 aa, Homo Sapiens
RSPEEWPNL

SEQ ID NO: 171826 - protein, 9 aa, Homo Sapiens
RSPFSFVYL

SEQ ID NO: 171827 - protein, 9 aa, Homo Sapiens
RSPGRAYAL

SEQ ID NO: 171828 - protein, 9 aa, Homo Sapiens
RSPMHRVTL

SEQ ID NO: 171829 - protein, 9 aa, Homo Sapiens
RSPNHIVVL

SEQ ID NO: 171830 - protein, 9 aa, Homo Sapiens
RSPPIKPLL

SEQ ID NO: 171831 - protein, 9 aa, Homo Sapiens
RSPPQAICL

SEQ ID NO: 171832 - protein, 9 aa, Homo Sapiens
RSPPRALVL

SEQ ID NO: 171833 - protein, 9 aa, Homo Sapiens
RSPSKNIYL

SEQ ID NO: 171834 - protein, 9 aa, Homo Sapiens
RSPTAWHRL

SEQ ID NO: 171835 - protein, 9 aa, Homo Sapiens
RSPTKAPHL

SEQ ID NO: 171836 - protein, 9 aa, Homo Sapiens
RSPVTKIML

SEQ ID NO: 171837 - protein, 9 aa, Homo Sapiens
RSPVVHSVL

SEQ ID NO: 171838 - protein, 9 aa, Homo Sapiens
RSPVYLTVL

SEQ ID NO: 171839 - protein, 9 aa, Homo Sapiens
RSVKVKIKL

SEQ ID NO: 171840 - protein, 9 aa, Homo Sapiens
RTCAVHITL

SEQ ID NO: 171841 - protein, 9 aa, Homo Sapiens
RTIAKRLVL

SEQ ID NO: 171842 - protein, 9 aa, Homo Sapiens
RTIPGKQQL

SEQ ID NO: 171843 - protein, 9 aa, Homo Sapiens
RTPSGKLRL

SEQ ID NO: 171844 - protein, 9 aa, Homo Sapiens
RTPYHVNLL

SEQ ID NO: 171845 - protein, 9 aa, Homo Sapiens
RTVDARLKL

SEQ ID NO: 171846 - protein, 9 aa, Homo Sapiens
RVAIKKIVL

SEQ ID NO: 171847 - protein, 9 aa, Homo Sapiens
RVCDYHTKL

SEQ ID NO: 171848 - protein, 9 aa, Homo Sapiens
RVIDYILDL

SEQ ID NO: 171849 - protein, 9 aa, Homo Sapiens
RVIGPPVVL

SEQ ID NO: 171850 - protein, 9 aa, Homo Sapiens
RVIKNSIRL

SEQ ID NO: 171851 - protein, 9 aa, Homo Sapiens
RVPAHAVVV

SEQ ID NO: 171852 - protein, 9 aa, Homo Sapiens
RVPAHRNLL

SEQ ID NO: 171853 - protein, 9 aa, Homo Sapiens
RVPAKSTLL

SEQ ID NO: 171854 - protein, 9 aa, Homo Sapiens
RVPATNLIL

SEQ ID NO: 171855 - protein, 9 aa, Homo Sapiens
RVPIAKILL

SEQ ID NO: 171856 - protein, 9 aa, Homo Sapiens
RVPKDRPSL

SEQ ID NO: 171857 - protein, 9 aa, Homo Sapiens
RVPKSKLEV

SEQ ID NO: 171858 - protein, 9 aa, Homo Sapiens
RVPQEAVKL

SEQ ID NO: 171859 - protein, 9 aa, Homo Sapiens
RVPSPKVVL

SEQ ID NO: 171860 - protein, 9 aa, Homo Sapiens
RVPTASYDL

SEQ ID NO: 171861 - protein, 9 aa, Homo Sapiens
RVSSSKISL

SEQ ID NO: 171862 - protein, 9 aa, Homo Sapiens
RVVLKRVLL

SEQ ID NO: 171863 - protein, 9 aa, Homo Sapiens
RYPCFFNTL

SEQ ID NO: 171864 - protein, 9 aa, Homo Sapiens
RYPDPLIKV

SEQ ID NO: 171865 - protein, 9 aa, Homo Sapiens
RYPDSHQLF

SEQ ID NO: 171866 - protein, 9 aa, Homo Sapiens
RYPEGGQIL

SEQ ID NO: 171867 - protein, 9 aa, Homo Sapiens
RYPERITIL

SEQ ID NO: 171868 - protein, 9 aa, Homo Sapiens
RYPPAANEL

SEQ ID NO: 171869 - protein, 9 aa, Homo Sapiens
RYPPDSVRL

SEQ ID NO: 171870 - protein, 9 aa, Homo Sapiens
RYPRESNKL

SEQ ID NO: 171871 - protein, 9 aa, Homo Sapiens
RYPTSIASL

SEQ ID NO: 171872 - protein, 9 aa, Homo Sapiens
RYPTTFVMV

SEQ ID NO: 171873 - protein, 9 aa, Homo Sapiens
SAPAKKIKL

SEQ ID NO: 171874 - protein, 9 aa, Homo Sapiens
SFPCHQTKL

SEQ ID NO: 171875 - protein, 9 aa, Homo Sapiens
SFPEKKPRL

SEQ ID NO: 171876 - protein, 9 aa, Homo Sapiens
SFPHEKLLL

SEQ ID NO: 171877 - protein, 9 aa, Homo Sapiens
SFPLVTVHL

SEQ ID NO: 171878 - protein, 9 aa, Homo Sapiens
SFPNVYHEL

SEQ ID NO: 171879 - protein, 9 aa, Homo Sapiens
SFPSEPVKL

SEQ ID NO: 171880 - protein, 9 aa, Homo Sapiens
SFPTQPVNL

SEQ ID NO: 171881 - protein, 9 aa, Homo Sapiens
SGPKSKLKL

SEQ ID NO: 171882 - protein, 9 aa, Homo Sapiens
SHPSDHIAL

SEQ ID NO: 171883 - protein, 9 aa, Homo Sapiens
SIIADRIAL

SEQ ID NO: 171884 - protein, 9 aa, Homo Sapiens
SIPALTATL

SEQ ID NO: 171885 - protein, 9 aa, Homo Sapiens
SIPGARPVL

SEQ ID NO: 171886 - protein, 9 aa, Homo Sapiens
SIPKDKQML

SEQ ID NO: 171887 - protein, 9 aa, Homo Sapiens
SIPKGKISI

SEQ ID NO: 171888 - protein, 9 aa, Homo Sapiens
SIPTHKCGL

SEQ ID NO: 171889 - protein, 9 aa, Homo Sapiens
SIPTKALEL

SEQ ID NO: 171890 - protein, 9 aa, Homo Sapiens
SITKNTAKL

SEQ ID NO: 171891 - protein, 9 aa, Homo Sapiens
SIVDYKPNL

SEQ ID NO: 171892 - protein, 9 aa, Homo Sapiens
SKIKGKPVL

SEQ ID NO: 171893 - protein, 9 aa, Homo Sapiens
SLIGEKVCL

SEQ ID NO: 171894 - protein, 9 aa, Homo Sapiens
SLIKHKIML

SEQ ID NO: 171895 - protein, 9 aa, Homo Sapiens
SLITNKVIM

SEQ ID NO: 171896 - protein, 9 aa, Homo Sapiens
SLIVGGVDL

SEQ ID NO: 171897 - protein, 9 aa, Homo Sapiens
SLPASKQML

SEQ ID NO: 171898 - protein, 9 aa, Homo Sapiens
SLPDIKVYL

SEQ ID NO: 171899 - protein, 9 aa, Homo Sapiens
SLPRFQVTL

SEQ ID NO: 171900 - protein, 9 aa, Homo Sapiens
SLPSTKPQL

SEQ ID NO: 171901 - protein, 9 aa, Homo Sapiens
SLPSWKSLL

SEQ ID NO: 171902 - protein, 9 aa, Homo Sapiens
SLTPVTLVL

SEQ ID NO: 171903 - protein, 9 aa, Homo Sapiens
SMPDHSIHL

SEQ ID NO: 171904 - protein, 9 aa, Homo Sapiens
SMPSNSVQL

SEQ ID NO: 171905 - protein, 9 aa, Homo Sapiens
SMVHKRINL

SEQ ID NO: 171906 - protein, 9 aa, Homo Sapiens
SMVIQKIYL

SEQ ID NO: 171907 - protein, 9 aa, Homo Sapiens
SNIEEKIKL

SEQ ID NO: 171908 - protein, 9 aa, Homo Sapiens
SNIYSKFLL

SEQ ID NO: 171909 - protein, 9 aa, Homo Sapiens
SQPGVAIGL

SEQ ID NO: 171910 - protein, 9 aa, Homo Sapiens
SQPTSTIIL

SEQ ID NO: 171911 - protein, 9 aa, Homo Sapiens
SRPESSVDL

SEQ ID NO: 171912 - protein, 9 aa, Homo Sapiens
SRPGKNVQL

SEQ ID NO: 171913 - protein, 9 aa, Homo Sapiens
SRPKSNIVL

SEQ ID NO: 171914 - protein, 9 aa, Homo Sapiens
SRPLSAVVL

SEQ ID NO: 171915 - protein, 9 aa, Homo Sapiens
SSIKDKIVL

SEQ ID NO: 171916 - protein, 9 aa, Homo Sapiens
SSPGQAVEL

SEQ ID NO: 171917 - protein, 9 aa, Homo Sapiens
SSPKEAVGL

SEQ ID NO: 171918 - protein, 9 aa, Homo Sapiens
SSPKGKFSL

SEQ ID NO: 171919 - protein, 9 aa, Homo Sapiens
SSPKQYMQL

SEQ ID NO: 171920 - protein, 9 aa, Homo Sapiens
SSVISKIDL

SEQ ID NO: 171921 - protein, 9 aa, Homo Sapiens
STIGQKIAL

SEQ ID NO: 171922 - protein, 9 aa, Homo Sapiens
STITSKMNL

SEQ ID NO: 171923 - protein, 9 aa, Homo Sapiens
STPKHYIRF

SEQ ID NO: 171924 - protein, 9 aa, Homo Sapiens
STPSGYLEL

SEQ ID NO: 171925 - protein, 9 aa, Homo Sapiens
STPTEKPKL

SEQ ID NO: 171926 - protein, 9 aa, Homo Sapiens
STVTTKVTL

SEQ ID NO: 171927 - protein, 9 aa, Homo Sapiens
SVIDEPVRL

SEQ ID NO: 171928 - protein, 9 aa, Homo Sapiens
SVIPDKPSL

SEQ ID NO: 171929 - protein, 9 aa, Homo Sapiens
SVIYKKFQL

SEQ ID NO: 171930 - protein, 9 aa, Homo Sapiens
SVPKHKLTL

SEQ ID NO: 171931 - protein, 9 aa, Homo Sapiens
SVPNKALEL

SEQ ID NO: 171932 - protein, 9 aa, Homo Sapiens
SVPPYGVAL

SEQ ID NO: 171933 - protein, 9 aa, Homo Sapiens
SVPQIHVNL

SEQ ID NO: 171934 - protein, 9 aa, Homo Sapiens
SVPSAKVSL

SEQ ID NO: 171935 - protein, 9 aa, Homo Sapiens
SVPTDYSYL

SEQ ID NO: 171936 - protein, 9 aa, Homo Sapiens
SYPHHATQL

SEQ ID NO: 171937 - protein, 9 aa, Homo Sapiens
TFPNNPVEL

SEQ ID NO: 171938 - protein, 9 aa, Homo Sapiens
TFPQNPVEL

SEQ ID NO: 171939 - protein, 9 aa, Homo Sapiens
TFPVHRQKL

SEQ ID NO: 171940 - protein, 9 aa, Homo Sapiens
THPFKTIEL

SEQ ID NO: 171941 - protein, 9 aa, Homo Sapiens
TIILSKMML

SEQ ID NO: 171942 - protein, 9 aa, Homo Sapiens
TIPGGTVLL

SEQ ID NO: 171943 - protein, 9 aa, Homo Sapiens
TIPKHRHLL

SEQ ID NO: 171944 - protein, 9 aa, Homo Sapiens
TIVTDGIQL

SEQ ID NO: 171945 - protein, 9 aa, Homo Sapiens
TLIGSKFRL

SEQ ID NO: 171946 - protein, 9 aa, Homo Sapiens
TLPAQKCIL

SEQ ID NO: 171947 - protein, 9 aa, Homo Sapiens
TLPEGCVVL

SEQ ID NO: 171948 - protein, 9 aa, Homo Sapiens
TLPPGSVLL

SEQ ID NO: 171949 - protein, 9 aa, Homo Sapiens
TLPTQKCHL

SEQ ID NO: 171950 - protein, 9 aa, Homo Sapiens
TLVKNCIVL

SEQ ID NO: 171951 - protein, 9 aa, Homo Sapiens
TMPPTTVIL

SEQ ID NO: 171952 - protein, 9 aa, Homo Sapiens
TMVKKKVVF

SEQ ID NO: 171953 - protein, 9 aa, Homo Sapiens
TNVINKIIL

SEQ ID NO: 171954 - protein, 9 aa, Homo Sapiens
TQPLYNIRL

SEQ ID NO: 171955 - protein, 9 aa, Homo Sapiens
TRPEKALIL

SEQ ID NO: 171956 - protein, 9 aa, Homo Sapiens
TRPKMSIVL

SEQ ID NO: 171957 - protein, 9 aa, Homo Sapiens
TTILYKLKL

SEQ ID NO: 171958 - protein, 9 aa, Homo Sapiens
TTPKHYIRF

SEQ ID NO: 171959 - protein, 9 aa, Homo Sapiens
TTPQCKYLL

SEQ ID NO: 171960 - protein, 9 aa, Homo Sapiens
TVIATNILL

SEQ ID NO: 171961 - protein, 9 aa, Homo Sapiens
TVPKETIHL

SEQ ID NO: 171962 - protein, 9 aa, Homo Sapiens
TYPGPAVVL

SEQ ID NO: 171963 - protein, 9 aa, Homo Sapiens
VAPEEHPVL

SEQ ID NO: 171964 - protein, 9 aa, Homo Sapiens
VAPPGCSHL

SEQ ID NO: 171965 - protein, 9 aa, Homo Sapiens
VFPHLTVVL

SEQ ID NO: 171966 - protein, 9 aa, Homo Sapiens
VFPKEPVEL

SEQ ID NO: 171967 - protein, 9 aa, Homo Sapiens
VFPSMPIKL

SEQ ID NO: 171968 - protein, 9 aa, Homo Sapiens
VGPEEKIAL

SEQ ID NO: 171969 - protein, 9 aa, Homo Sapiens
VIAPNPAQL

SEQ ID NO: 171970 - protein, 9 aa, Homo Sapiens
VIAPPLIKF

SEQ ID NO: 171971 - protein, 9 aa, Homo Sapiens
VIIGKTVTL

SEQ ID NO: 171972 - protein, 9 aa, Homo Sapiens
VIIGTKTIL

SEQ ID NO: 171973 - protein, 9 aa, Homo Sapiens
VINPEPITL

SEQ ID NO: 171974 - protein, 9 aa, Homo Sapiens
VIPAEKFDL

SEQ ID NO: 171975 - protein, 9 aa, Homo Sapiens
VIPKSKFVL

SEQ ID NO: 171976 - protein, 9 aa, Homo Sapiens
VIPPCKSEL

SEQ ID NO: 171977 - protein, 9 aa, Homo Sapiens
VIPRITIEM

SEQ ID NO: 171978 - protein, 9 aa, Homo Sapiens
VIPSTGIKL

SEQ ID NO: 171979 - protein, 9 aa, Homo Sapiens
VIPTERNLL

SEQ ID NO: 171980 - protein, 9 aa, Homo Sapiens
VIPTNVPEL

SEQ ID NO: 171981 - protein, 9 aa, Homo Sapiens
VITKTGAKL

SEQ ID NO: 171982 - protein, 9 aa, Homo Sapiens
VKSGDKPSL

SEQ ID NO: 171983 - protein, 9 aa, Homo Sapiens
VLPKLYVKL

SEQ ID NO: 171984 - protein, 9 aa, Homo Sapiens
VLPKSRVEL

SEQ ID NO: 171985 - protein, 9 aa, Homo Sapiens
VLPNIHPEL

SEQ ID NO: 171986 - protein, 9 aa, Homo Sapiens
VLPNTALHL

SEQ ID NO: 171987 - protein, 9 aa, Homo Sapiens
VLPPTCIQL

SEQ ID NO: 171988 - protein, 9 aa, Homo Sapiens
VLPVKKPKM

SEQ ID NO: 171989 - protein, 9 aa, Homo Sapiens
VLPVPPIEF

SEQ ID NO: 171990 - protein, 9 aa, Homo Sapiens
VMAPRTLFL

SEQ ID NO: 171991 - protein, 9 aa, Homo Sapiens
VMPKKRQAL

SEQ ID NO: 171992 - protein, 9 aa, Homo Sapiens
VQPKSLVRL

SEQ ID NO: 171993 - protein, 9 aa, Homo Sapiens
VQPSKYHFL

SEQ ID NO: 171994 - protein, 9 aa, Homo Sapiens
VQPTHVIHL

SEQ ID NO: 171995 - protein, 9 aa, Homo Sapiens
VQPVVHPQL

SEQ ID NO: 171996 - protein, 9 aa, Homo Sapiens
VQVHSKFRL

SEQ ID NO: 171997 - protein, 9 aa, Homo Sapiens
VRPPPGPEL

SEQ ID NO: 171998 - protein, 9 aa, Homo Sapiens
VSPKKSTVL

SEQ ID NO: 171999 - protein, 9 aa, Homo Sapiens
VSPRQTLEL

SEQ ID NO: 172000 - protein, 9 aa, Homo Sapiens
VVAKDGLKL

SEQ ID NO: 172001 - protein, 9 aa, Homo Sapiens
VVAPAGITL

SEQ ID NO: 172002 - protein, 9 aa, Homo Sapiens
VVPDHPVLL

SEQ ID NO: 172003 - protein, 9 aa, Homo Sapiens
VVPKDRVAL

SEQ ID NO: 172004 - protein, 9 aa, Homo Sapiens
VVPQTTVIL

SEQ ID NO: 172005 - protein, 9 aa, Homo Sapiens
VYIKHPVSL

SEQ ID NO: 172006 - protein, 9 aa, Homo Sapiens
YIIKDKHIL

SEQ ID NO: 172007 - protein, 10 aa, Homo Sapiens
AGDALLSLLA

SEQ ID NO: 172008 - protein, 10 aa, Homo Sapiens
EESNYELEGK

SEQ ID NO: 172009 - protein, 10 aa, Homo Sapiens
HFKESIKFIH

SEQ ID NO: 172010 - protein, 10 aa, Homo Sapiens
KAPKPGGLSL

SEQ ID NO: 172011 - protein, 10 aa, Homo Sapiens
KFPAYERVLL

SEQ ID NO: 172012 - protein, 10 aa, Homo Sapiens
KFPYPTQAEL

SEQ ID NO: 172013 - protein, 10 aa, Homo Sapiens
KIIAENKIRL

SEQ ID NO: 172014 - protein, 10 aa, Homo Sapiens
KIIDRAITSL

SEQ ID NO: 172015 - protein, 10 aa, Homo Sapiens
KIIEARLKMY

SEQ ID NO: 172016 - protein, 10 aa, Homo Sapiens
KIIEDLGVHF

SEQ ID NO: 172017 - protein, 10 aa, Homo Sapiens
KIPSSHPVSL

SEQ ID NO: 172018 - protein, 10 aa, Homo Sapiens
KISSVQPICL

SEQ ID NO: 172019 - protein, 10 aa, Homo Sapiens
KLLKCSRLVL

SEQ ID NO: 172020 - protein, 10 aa, Homo Sapiens
KLPAEPPALL

SEQ ID NO: 172021 - protein, 10 aa, Homo Sapiens
KLPAGKNVLL

SEQ ID NO: 172022 - protein, 10 aa, Homo Sapiens
KLPATEKPVL

SEQ ID NO: 172023 - protein, 10 aa, Homo Sapiens
KLPGDKGLVL

SEQ ID NO: 172024 - protein, 10 aa, Homo Sapiens
KLPPGFPVKL

SEQ ID NO: 172025 - protein, 10 aa, Homo Sapiens
KLPSVPSTHL

SEQ ID NO: 172026 - protein, 10 aa, Homo Sapiens
KLWPLPKALL

SEQ ID NO: 172027 - protein, 10 aa, Homo Sapiens
KMPGPGCVFL

SEQ ID NO: 172028 - protein, 10 aa, Homo Sapiens
KMPSLQPVVM

SEQ ID NO: 172029 - protein, 10 aa, Homo Sapiens
KNPKNPGLWL

SEQ ID NO: 172030 - protein, 10 aa, Homo Sapiens
KQPVGGGQKL

SEQ ID NO: 172031 - protein, 10 aa, Homo Sapiens
KTLDQAKAVL

SEQ ID NO: 172032 - protein, 10 aa, Homo Sapiens
KVPKERLALL

SEQ ID NO: 172033 - protein, 10 aa, Homo Sapiens
KVPPPWLIAM

SEQ ID NO: 172034 - protein, 10 aa, Homo Sapiens
KYPASTVQIL

SEQ ID NO: 172035 - protein, 10 aa, Homo Sapiens
KYVGSRPIKL

SEQ ID NO: 172036 - protein, 10 aa, Homo Sapiens
PFADVAPLQL

SEQ ID NO: 172037 - protein, 10 aa, Homo Sapiens
PLSMAPPLSL

SEQ ID NO: 172038 - protein, 10 aa, Homo Sapiens
PPSKPPPVEL

SEQ ID NO: 172039 - protein, 10 aa, Homo Sapiens
PSFPVSTLKL

SEQ ID NO: 172040 - protein, 10 aa, Homo Sapiens
QSYPHHATQL

SEQ ID NO: 172041 - protein, 10 aa, Homo Sapiens
RFPNFTNQLL

SEQ ID NO: 172042 - protein, 10 aa, Homo Sapiens
RHPQPGAVEL

SEQ ID NO: 172043 - protein, 10 aa, Homo Sapiens
RIINLGPVML

SEQ ID NO: 172044 - protein, 10 aa, Homo Sapiens
RIPAEGRVAL

SEQ ID NO: 172045 - protein, 10 aa, Homo Sapiens
RISQLDALEL

SEQ ID NO: 172046 - protein, 10 aa, Homo Sapiens
RLPYKAGLSL

SEQ ID NO: 172047 - protein, 10 aa, Homo Sapiens
RLYPLRKYAV

SEQ ID NO: 172048 - protein, 10 aa, Homo Sapiens
RMDPLEAIQL

SEQ ID NO: 172049 - protein, 10 aa, Homo Sapiens
RRPKNVVLRL

SEQ ID NO: 172050 - protein, 10 aa, Homo Sapiens
RTPGNRIVYL

SEQ ID NO: 172051 - protein, 10 aa, Homo Sapiens
RYPVNSVNIL

SEQ ID NO: 172052 - protein, 10 aa, Homo Sapiens
SLPRGKGIRL

SEQ ID NO: 172053 - protein, 10 aa, Homo Sapiens
SVAQVAPVDL

SEQ ID NO: 172054 - protein, 10 aa, Homo Sapiens
THPPGPAVQL

SEQ ID NO: 172055 - protein, 10 aa, Homo Sapiens
TLDGLPPLRL

SEQ ID NO: 172056 - protein, 10 aa, Homo Sapiens
TYPKGAGEML

SEQ ID NO: 172057 - protein, 11 aa, Homo Sapiens
KFPGPLENQRL

SEQ ID NO: 172058 - protein, 11 aa, Homo Sapiens
KFPPKDGFVAL

SEQ ID NO: 172059 - protein, 11 aa, Homo Sapiens
KFPSEYVPTVF

SEQ ID NO: 172060 - protein, 11 aa, Homo Sapiens
KIVPAKDLVLL

SEQ ID NO: 172061 - protein, 11 aa, Homo Sapiens
KLPATEKPVLL

SEQ ID NO: 172062 - protein, 11 aa, Homo Sapiens
KLPPTDAYYKL

SEQ ID NO: 172063 - protein, 11 aa, Homo Sapiens
KLPSGKLQVHL

SEQ ID NO: 172064 - protein, 11 aa, Homo Sapiens
KLPVANEYLLL

SEQ ID NO: 172065 - protein, 11 aa, Homo Sapiens
KMPQSMPEYAL

SEQ ID NO: 172066 - protein, 11 aa, Homo Sapiens
KSPASDTYIVF

SEQ ID NO: 172067 - protein, 11 aa, Homo Sapiens
KVPTYKDYVDL

SEQ ID NO: 172068 - protein, 11 aa, Homo Sapiens
NSSIIADRIAL

SEQ ID NO: 172069 - protein, 11 aa, Homo Sapiens
PGSLIPEALRL

SEQ ID NO: 172070 - protein, 11 aa, Homo Sapiens
RIPHNNFYRKL

SEQ ID NO: 172071 - protein, 11 aa, Homo Sapiens
RLPEMGSNVEL

SEQ ID NO: 172072 - protein, 11 aa, Homo Sapiens
RPPSKPPPVEL

SEQ ID NO: 172073 - protein, 11 aa, Homo Sapiens
RVIGPPVVLNC

SEQ ID NO: 172074 - protein, 8 aa, Homo Sapiens
ASPPPLLL

SEQ ID NO: 172075 - protein, 8 aa, Homo Sapiens
GLPEPLML

SEQ ID NO: 172076 - protein, 8 aa, Homo Sapiens
HKPGPITL

SEQ ID NO: 172077 - protein, 8 aa, Homo Sapiens
HRPPPIKL

SEQ ID NO: 172078 - protein, 8 aa, Homo Sapiens
IGKKRELK

SEQ ID NO: 172079 - protein, 8 aa, Homo Sapiens
IMPKDIQL

SEQ ID NO: 172080 - protein, 8 aa, Homo Sapiens
IQEAIALI

SEQ ID NO: 172081 - protein, 8 aa, Homo Sapiens
ITKTGAKL

SEQ ID NO: 172082 - protein, 8 aa, Homo Sapiens
KFIEGVVL

SEQ ID NO: 172083 - protein, 8 aa, Homo Sapiens
KIADPFVL

SEQ ID NO: 172084 - protein, 8 aa, Homo Sapiens
KIIAAITL

SEQ ID NO: 172085 - protein, 8 aa, Homo Sapiens
KIPSPVKL

SEQ ID NO: 172086 - protein, 8 aa, Homo Sapiens
KKPTPIQL

SEQ ID NO: 172087 - protein, 8 aa, Homo Sapiens
KMPLPLKL

SEQ ID NO: 172088 - protein, 8 aa, Homo Sapiens
KSPPPMNL

SEQ ID NO: 172089 - protein, 8 aa, Homo Sapiens
KVPFPLTL

SEQ ID NO: 172090 - protein, 8 aa, Homo Sapiens
LPKLYVKL

SEQ ID NO: 172091 - protein, 8 aa, Homo Sapiens
PLPPAVFL

SEQ ID NO: 172092 - protein, 8 aa, Homo Sapiens
QIAEAVRL

SEQ ID NO: 172093 - protein, 8 aa, Homo Sapiens
QIPAAVKL

SEQ ID NO: 172094 - protein, 8 aa, Homo Sapiens
RFPEALRL

SEQ ID NO: 172095 - protein, 8 aa, Homo Sapiens
RIPEPVHL

SEQ ID NO: 172096 - protein, 8 aa, Homo Sapiens
SIAGPVLL

SEQ ID NO: 172097 - protein, 8 aa, Homo Sapiens
SIAVPIVL

SEQ ID NO: 172098 - protein, 8 aa, Homo Sapiens
SIPVGISL

SEQ ID NO: 172099 - protein, 8 aa, Homo Sapiens
TGPPPLLL

SEQ ID NO: 172100 - protein, 8 aa, Homo Sapiens
TIAEGLTL

SEQ ID NO: 172101 - protein, 8 aa, Homo Sapiens
TIPIAVAL

SEQ ID NO: 172102 - protein, 8 aa, Homo Sapiens
TIPLAVVL

SEQ ID NO: 172103 - protein, 8 aa, Homo Sapiens
TLPTPMVL

SEQ ID NO: 172104 - protein, 8 aa, Homo Sapiens
VAPAGITL

SEQ ID NO: 172105 - protein, 8 aa, Homo Sapiens
VIGPPVVL

SEQ ID NO: 172106 - protein, 9 aa, Homo Sapiens
AFPGASLYL

SEQ ID NO: 172107 - protein, 9 aa, Homo Sapiens
AGPDRFVVL

SEQ ID NO: 172108 - protein, 9 aa, Homo Sapiens
AGPPDTISL

SEQ ID NO: 172109 - protein, 9 aa, Homo Sapiens
AHPKAKLVL

SEQ ID NO: 172110 - protein, 9 aa, Homo Sapiens
AHPLETLIL

SEQ ID NO: 172111 - protein, 9 aa, Homo Sapiens
AIIEYMPLL

SEQ ID NO: 172112 - protein, 9 aa, Homo Sapiens
AIIKEPIDI

SEQ ID NO: 172113 - protein, 9 aa, Homo Sapiens
AIIRDRAAL

SEQ ID NO: 172114 - protein, 9 aa, Homo Sapiens
AIISQKPQL

SEQ ID NO: 172115 - protein, 9 aa, Homo Sapiens
AIPKKKMNL

SEQ ID NO: 172116 - protein, 9 aa, Homo Sapiens
AIPNARIEL

SEQ ID NO: 172117 - protein, 9 aa, Homo Sapiens
AITPAGINL

SEQ ID NO: 172118 - protein, 9 aa, Homo Sapiens
AIVAKQVLL

SEQ ID NO: 172119 - protein, 9 aa, Homo Sapiens
AIVGNKVDL

SEQ ID NO: 172120 - protein, 9 aa, Homo Sapiens
AIVNSALKL

SEQ ID NO: 172121 - protein, 9 aa, Homo Sapiens
ALIKDKILF

SEQ ID NO: 172122 - protein, 9 aa, Homo Sapiens
ALPKLPISL

SEQ ID NO: 172123 - protein, 9 aa, Homo Sapiens
ALVKEKLRL

SEQ ID NO: 172124 - protein, 9 aa, Homo Sapiens
APLPPAVFL

SEQ ID NO: 172125 - protein, 9 aa, Homo Sapiens
AQPDGKIRL

SEQ ID NO: 172126 - protein, 9 aa, Homo Sapiens
AQPETPVTL

SEQ ID NO: 172127 - protein, 9 aa, Homo Sapiens
ARPMRAIFL

SEQ ID NO: 172128 - protein, 9 aa, Homo Sapiens
ASPTQPIQL

SEQ ID NO: 172129 - protein, 9 aa, Homo Sapiens
ATPKAKIYL

SEQ ID NO: 172130 - protein, 9 aa, Homo Sapiens
ATPLKKVIL

SEQ ID NO: 172131 - protein, 9 aa, Homo Sapiens
AVPTIYTKL

SEQ ID NO: 172132 - protein, 9 aa, Homo Sapiens
AVVPGTLLL

SEQ ID NO: 172133 - protein, 9 aa, Homo Sapiens
EIIDNHITL

SEQ ID NO: 172134 - protein, 9 aa, Homo Sapiens
EIIKQKLTL

SEQ ID NO: 172135 - protein, 9 aa, Homo Sapiens
EIISKGIKL

SEQ ID NO: 172136 - protein, 9 aa, Homo Sapiens
EIVPNGITL

SEQ ID NO: 172137 - protein, 9 aa, Homo Sapiens
GFPEGSVEL

SEQ ID NO: 172138 - protein, 9 aa, Homo Sapiens
GKLPKGILL

SEQ ID NO: 172139 - protein, 9 aa, Homo Sapiens
GQPRDGLKL

SEQ ID NO: 172140 - protein, 9 aa, Homo Sapiens
GVPKTHLEL

SEQ ID NO: 172141 - protein, 9 aa, Homo Sapiens
HAPRIPVTL

SEQ ID NO: 172142 - protein, 9 aa, Homo Sapiens
HFPHKPIIL

SEQ ID NO: 172143 - protein, 9 aa, Homo Sapiens
HGIQGKFSL

SEQ ID NO: 172144 - protein, 9 aa, Homo Sapiens
HGPAAKPTL

SEQ ID NO: 172145 - protein, 9 aa, Homo Sapiens
HGPNHPLVL

SEQ ID NO: 172146 - protein, 9 aa, Homo Sapiens
HGVKDKPVL

SEQ ID NO: 172147 - protein, 9 aa, Homo Sapiens
HHPDYNNEL

SEQ ID NO: 172148 - protein, 9 aa, Homo Sapiens
HITPDNFEL

SEQ ID NO: 172149 - protein, 9 aa, Homo Sapiens
HIVVNKAEL

SEQ ID NO: 172150 - protein, 9 aa, Homo Sapiens
HLIEESVKL

SEQ ID NO: 172151 - protein, 9 aa, Homo Sapiens
HLPDVCVNL

SEQ ID NO: 172152 - protein, 9 aa, Homo Sapiens
HLPNTYVDL

SEQ ID NO: 172153 - protein, 9 aa, Homo Sapiens
HQPTTWVSF

SEQ ID NO: 172154 - protein, 9 aa, Homo Sapiens
HSPGDYILL

SEQ ID NO: 172155 - protein, 9 aa, Homo Sapiens
HSPPNKPKL

SEQ ID NO: 172156 - protein, 9 aa, Homo Sapiens
HVPAVKLLL

SEQ ID NO: 172157 - protein, 9 aa, Homo Sapiens
HVPEHAVVL

SEQ ID NO: 172158 - protein, 9 aa, Homo Sapiens
IHPADSVYL

SEQ ID NO: 172159 - protein, 9 aa, Homo Sapiens
IIAENKIRL

SEQ ID NO: 172160 - protein, 9 aa, Homo Sapiens
IINKDPTLL

SEQ ID NO: 172161 - protein, 9 aa, Homo Sapiens
IRPEHVLRL

SEQ ID NO: 172162 - protein, 9 aa, Homo Sapiens
ISPKEFVHL

SEQ ID NO: 172163 - protein, 9 aa, Homo Sapiens
ISPKHFVHL

SEQ ID NO: 172164 - protein, 9 aa, Homo Sapiens
IVPDGTLQL

SEQ ID NO: 172165 - protein, 9 aa, Homo Sapiens
IYPSIFHVL

SEQ ID NO: 172166 - protein, 9 aa, Homo Sapiens
KAPGFAQML

SEQ ID NO: 172167 - protein, 9 aa, Homo Sapiens
KAPGSTSNL

SEQ ID NO: 172168 - protein, 9 aa, Homo Sapiens
KAPLSKVRL

SEQ ID NO: 172169 - protein, 9 aa, Homo Sapiens
KAPPIPLKL

SEQ ID NO: 172170 - protein, 9 aa, Homo Sapiens
KAPVNTAEL

SEQ ID NO: 172171 - protein, 9 aa, Homo Sapiens
KAVGDGIVL

SEQ ID NO: 172172 - protein, 9 aa, Homo Sapiens
KEIEEKLRL

SEQ ID NO: 172173 - protein, 9 aa, Homo Sapiens
KFIDKQLEL

SEQ ID NO: 172174 - protein, 9 aa, Homo Sapiens
KFIPGKPVL

SEQ ID NO: 172175 - protein, 9 aa, Homo Sapiens
KFPAYERVL

SEQ ID NO: 172176 - protein, 9 aa, Homo Sapiens
KFPDSQNQL

SEQ ID NO: 172177 - protein, 9 aa, Homo Sapiens
KFPGIRPYL

SEQ ID NO: 172178 - protein, 9 aa, Homo Sapiens
KFPHESARL

SEQ ID NO: 172179 - protein, 9 aa, Homo Sapiens
KFPIVNAEL

SEQ ID NO: 172180 - protein, 9 aa, Homo Sapiens
KFPLMTLQL

SEQ ID NO: 172181 - protein, 9 aa, Homo Sapiens
KFPLTRPSL

SEQ ID NO: 172182 - protein, 9 aa, Homo Sapiens
KFPPKFVQL

SEQ ID NO: 172183 - protein, 9 aa, Homo Sapiens
KFPSEPNRL

SEQ ID NO: 172184 - protein, 9 aa, Homo Sapiens
KFPVKPADL

SEQ ID NO: 172185 - protein, 9 aa, Homo Sapiens
KFVNKSYLL

SEQ ID NO: 172186 - protein, 9 aa, Homo Sapiens
KFVVKKPEL

SEQ ID NO: 172187 - protein, 9 aa, Homo Sapiens
KGIGEFFRL

SEQ ID NO: 172188 - protein, 9 aa, Homo Sapiens
KGPDAASKL

SEQ ID NO: 172189 - protein, 9 aa, Homo Sapiens
KGPEDTAQL

SEQ ID NO: 172190 - protein, 9 aa, Homo Sapiens
KGPPAALTL

SEQ ID NO: 172191 - protein, 9 aa, Homo Sapiens
KHPATRTVL

SEQ ID NO: 172192 - protein, 9 aa, Homo Sapiens
KHPDASVNF

SEQ ID NO: 172193 - protein, 9 aa, Homo Sapiens
KHPDSSVNF

SEQ ID NO: 172194 - protein, 9 aa, Homo Sapiens
KHPKYCIEL

SEQ ID NO: 172195 - protein, 9 aa, Homo Sapiens
KIAEIKSLL

SEQ ID NO: 172196 - protein, 9 aa, Homo Sapiens
KIAGYVTHL

SEQ ID NO: 172197 - protein, 9 aa, Homo Sapiens
KIAIQKITL

SEQ ID NO: 172198 - protein, 9 aa, Homo Sapiens
KIAKPLSSL

SEQ ID NO: 172199 - protein, 9 aa, Homo Sapiens
KIAPNTPQL

SEQ ID NO: 172200 - protein, 9 aa, Homo Sapiens
KIAPYSVEI

SEQ ID NO: 172201 - protein, 9 aa, Homo Sapiens
KIFQVAQEL

SEQ ID NO: 172202 - protein, 9 aa, Homo Sapiens
KIGNIKKTL

SEQ ID NO: 172203 - protein, 9 aa, Homo Sapiens
KIHAHKVVL

SEQ ID NO: 172204 - protein, 9 aa, Homo Sapiens
KIHPMAYQL

SEQ ID NO: 172205 - protein, 9 aa, Homo Sapiens
KIIASSPEM

SEQ ID NO: 172206 - protein, 9 aa, Homo Sapiens
KIIDGLLVM

SEQ ID NO: 172207 - protein, 9 aa, Homo Sapiens
KIIEARLKM

SEQ ID NO: 172208 - protein, 9 aa, Homo Sapiens
KIIKEKQAF

SEQ ID NO: 172209 - protein, 9 aa, Homo Sapiens
KIIKKPMDL

SEQ ID NO: 172210 - protein, 9 aa, Homo Sapiens
KIIKNPMDL

SEQ ID NO: 172211 - protein, 9 aa, Homo Sapiens
KIISESAQM

SEQ ID NO: 172212 - protein, 9 aa, Homo Sapiens
KIITAKAVL

SEQ ID NO: 172213 - protein, 9 aa, Homo Sapiens
KIITEGTKL

SEQ ID NO: 172214 - protein, 9 aa, Homo Sapiens
KIIYKLIRL

SEQ ID NO: 172215 - protein, 9 aa, Homo Sapiens
KILAEAAKL

SEQ ID NO: 172216 - protein, 9 aa, Homo Sapiens
KILQERAVL

SEQ ID NO: 172217 - protein, 9 aa, Homo Sapiens
KINEEKCNL

SEQ ID NO: 172218 - protein, 9 aa, Homo Sapiens
KINKKRIAL

SEQ ID NO: 172219 - protein, 9 aa, Homo Sapiens
KINPETVNL

SEQ ID NO: 172220 - protein, 9 aa, Homo Sapiens
KIPAHRVVL

SEQ ID NO: 172221 - protein, 9 aa, Homo Sapiens
KIPALAVEM

SEQ ID NO: 172222 - protein, 9 aa, Homo Sapiens
KIPASAVEM

SEQ ID NO: 172223 - protein, 9 aa, Homo Sapiens
KIPDTKGCL

SEQ ID NO: 172224 - protein, 9 aa, Homo Sapiens
KIPILGVHL

SEQ ID NO: 172225 - protein, 9 aa, Homo Sapiens
KIPKATPEL

SEQ ID NO: 172226 - protein, 9 aa, Homo Sapiens
KIPKAYIRF

SEQ ID NO: 172227 - protein, 9 aa, Homo Sapiens
KIPLVKVDM

SEQ ID NO: 172228 - protein, 9 aa, Homo Sapiens
KIPNFCVLL

SEQ ID NO: 172229 - protein, 9 aa, Homo Sapiens
KIPQVLVKL

SEQ ID NO: 172230 - protein, 9 aa, Homo Sapiens
KIPSYITDL

SEQ ID NO: 172231 - protein, 9 aa, Homo Sapiens
KIPTAKPEL

SEQ ID NO: 172232 - protein, 9 aa, Homo Sapiens
KIPTCKITL

SEQ ID NO: 172233 - protein, 9 aa, Homo Sapiens
KISKEKSFL

SEQ ID NO: 172234 - protein, 9 aa, Homo Sapiens
KISKSVTTL

SEQ ID NO: 172235 - protein, 9 aa, Homo Sapiens
KIVGNKWEA

SEQ ID NO: 172236 - protein, 9 aa, Homo Sapiens
KIVKPGMKL

SEQ ID NO: 172237 - protein, 9 aa, Homo Sapiens
KIVSGKVRF

SEQ ID NO: 172238 - protein, 9 aa, Homo Sapiens
KKIPSPVKL

SEQ ID NO: 172239 - protein, 9 aa, Homo Sapiens
KKNPDSLEL

SEQ ID NO: 172240 - protein, 9 aa, Homo Sapiens
KKPEKPLIL

SEQ ID NO: 172241 - protein, 9 aa, Homo Sapiens
KKPPPVPAL

SEQ ID NO: 172242 - protein, 9 aa, Homo Sapiens
KKVKFQAKL

SEQ ID NO: 172243 - protein, 9 aa, Homo Sapiens
KLAPIPVEL

SEQ ID NO: 172244 - protein, 9 aa, Homo Sapiens
KLAPPLVTL

SEQ ID NO: 172245 - protein, 9 aa, Homo Sapiens
KLIFPYVEL

SEQ ID NO: 172246 - protein, 9 aa, Homo Sapiens
KLIHEKHLL

SEQ ID NO: 172247 - protein, 9 aa, Homo Sapiens
KLIKDGLII

SEQ ID NO: 172248 - protein, 9 aa, Homo Sapiens
KLILKGVIL

SEQ ID NO: 172249 - protein, 9 aa, Homo Sapiens
KLIPNAIQI

SEQ ID NO: 172250 - protein, 9 aa, Homo Sapiens
KLLRDRIVL

SEQ ID NO: 172251 - protein, 9 aa, Homo Sapiens
KLNATNIEL

SEQ ID NO: 172252 - protein, 9 aa, Homo Sapiens
KLNIPKVLL

SEQ ID NO: 172253 - protein, 9 aa, Homo Sapiens
KLPAFSPLM

SEQ ID NO: 172254 - protein, 9 aa, Homo Sapiens
KLPAGKNVL

SEQ ID NO: 172255 - protein, 9 aa, Homo Sapiens
KLPANHPLL

SEQ ID NO: 172256 - protein, 9 aa, Homo Sapiens
KLPAPLPGL

SEQ ID NO: 172257 - protein, 9 aa, Homo Sapiens
KLPDCSLRL

SEQ ID NO: 172258 - protein, 9 aa, Homo Sapiens
KLPDGTWNL

SEQ ID NO: 172259 - protein, 9 aa, Homo Sapiens
KLPDKTVEF

SEQ ID NO: 172260 - protein, 9 aa, Homo Sapiens
KLPEDIMKL

SEQ ID NO: 172261 - protein, 9 aa, Homo Sapiens
KLPKEREEL

SEQ ID NO: 172262 - protein, 9 aa, Homo Sapiens
KLPKKHMQL

SEQ ID NO: 172263 - protein, 9 aa, Homo Sapiens
KLPLMKINF

SEQ ID NO: 172264 - protein, 9 aa, Homo Sapiens
KLPPKRPEL

SEQ ID NO: 172265 - protein, 9 aa, Homo Sapiens
KLPPLPLTL

SEQ ID NO: 172266 - protein, 9 aa, Homo Sapiens
KLPQFCAHL

SEQ ID NO: 172267 - protein, 9 aa, Homo Sapiens
KLPQQREKL

SEQ ID NO: 172268 - protein, 9 aa, Homo Sapiens
KLPQRTAKL

SEQ ID NO: 172269 - protein, 9 aa, Homo Sapiens
KLPSGKLQV

SEQ ID NO: 172270 - protein, 9 aa, Homo Sapiens
KLPSPAHHL

SEQ ID NO: 172271 - protein, 9 aa, Homo Sapiens
KLPSVPTKL

SEQ ID NO: 172272 - protein, 9 aa, Homo Sapiens
KLPTEWNVL

SEQ ID NO: 172273 - protein, 9 aa, Homo Sapiens
KLSVTKPVL

SEQ ID NO: 172274 - protein, 9 aa, Homo Sapiens
KLTELKAVL

SEQ ID NO: 172275 - protein, 9 aa, Homo Sapiens
KLVPRKDLL

SEQ ID NO: 172276 - protein, 9 aa, Homo Sapiens
KLVRDAFAL

SEQ ID NO: 172277 - protein, 9 aa, Homo Sapiens
KMAEIKVKL

SEQ ID NO: 172278 - protein, 9 aa, Homo Sapiens
KMIGLKAKL

SEQ ID NO: 172279 - protein, 9 aa, Homo Sapiens
KMPACNIML

SEQ ID NO: 172280 - protein, 9 aa, Homo Sapiens
KMPDGSVAL

SEQ ID NO: 172281 - protein, 9 aa, Homo Sapiens
KMPFDANKL

SEQ ID NO: 172282 - protein, 9 aa, Homo Sapiens
KMPQYQKEL

SEQ ID NO: 172283 - protein, 9 aa, Homo Sapiens
KMSHKRIML

SEQ ID NO: 172284 - protein, 9 aa, Homo Sapiens
KMVRQILEL

SEQ ID NO: 172285 - protein, 9 aa, Homo Sapiens
KMVVDAVMM

SEQ ID NO: 172286 - protein, 9 aa, Homo Sapiens
KNIPMTLEL

SEQ ID NO: 172287 - protein, 9 aa, Homo Sapiens
KNPAFKPVL

SEQ ID NO: 172288 - protein, 9 aa, Homo Sapiens
KNPQKFTIL

SEQ ID NO: 172289 - protein, 9 aa, Homo Sapiens
KNTLNKVVL

SEQ ID NO: 172290 - protein, 9 aa, Homo Sapiens
KNTYNKPKL

SEQ ID NO: 172291 - protein, 9 aa, Homo Sapiens
KNVAKTIQL

SEQ ID NO: 172292 - protein, 9 aa, Homo Sapiens
KNVEKRALL

SEQ ID NO: 172293 - protein, 9 aa, Homo Sapiens
KNVGGHVRL

SEQ ID NO: 172294 - protein, 9 aa, Homo Sapiens
KNVTEHLKL

SEQ ID NO: 172295 - protein, 9 aa, Homo Sapiens
KQALDKLKL

SEQ ID NO: 172296 - protein, 9 aa, Homo Sapiens
KQAQEKFEL

SEQ ID NO: 172297 - protein, 9 aa, Homo Sapiens
KQIAEAVRL

SEQ ID NO: 172298 - protein, 9 aa, Homo Sapiens
KQPAEHLQL

SEQ ID NO: 172299 - protein, 9 aa, Homo Sapiens
KQPEEGLRL

SEQ ID NO: 172300 - protein, 9 aa, Homo Sapiens
KQPLTATTL

SEQ ID NO: 172301 - protein, 9 aa, Homo Sapiens
KQPPPSIRL

SEQ ID NO: 172302 - protein, 9 aa, Homo Sapiens
KRPGESLRI

SEQ ID NO: 172303 - protein, 9 aa, Homo Sapiens
KRPVGGFLL

SEQ ID NO: 172304 - protein, 9 aa, Homo Sapiens
KSPAITATL

SEQ ID NO: 172305 - protein, 9 aa, Homo Sapiens
KSPATSCEL

SEQ ID NO: 172306 - protein, 9 aa, Homo Sapiens
KSPGFGLSL

SEQ ID NO: 172307 - protein, 9 aa, Homo Sapiens
KSPGTANVL

SEQ ID NO: 172308 - protein, 9 aa, Homo Sapiens
KSPNQSLRL

SEQ ID NO: 172309 - protein, 9 aa, Homo Sapiens
KSPQKSTVL

SEQ ID NO: 172310 - protein, 9 aa, Homo Sapiens
KSPSSKPSL

SEQ ID NO: 172311 - protein, 9 aa, Homo Sapiens
KSSDFYITL

SEQ ID NO: 172312 - protein, 9 aa, Homo Sapiens
KSSVKAVIL

SEQ ID NO: 172313 - protein, 9 aa, Homo Sapiens
KSVKVKIKL

SEQ ID NO: 172314 - protein, 9 aa, Homo Sapiens
KTADKKLLL

SEQ ID NO: 172315 - protein, 9 aa, Homo Sapiens
KTADKKLNL

SEQ ID NO: 172316 - protein, 9 aa, Homo Sapiens
KTAQNHPML

SEQ ID NO: 172317 - protein, 9 aa, Homo Sapiens
KTIDGHINL

SEQ ID NO: 172318 - protein, 9 aa, Homo Sapiens
KTIHKYVHL

SEQ ID NO: 172319 - protein, 9 aa, Homo Sapiens
KTILDKVKL

SEQ ID NO: 172320 - protein, 9 aa, Homo Sapiens
KTLQKKCYL

SEQ ID NO: 172321 - protein, 9 aa, Homo Sapiens
KTPAEFAKL

SEQ ID NO: 172322 - protein, 9 aa, Homo Sapiens
KTPDSRPSL

SEQ ID NO: 172323 - protein, 9 aa, Homo Sapiens
KTPESKPTI

SEQ ID NO: 172324 - protein, 9 aa, Homo Sapiens
KTPESNIKM

SEQ ID NO: 172325 - protein, 9 aa, Homo Sapiens
KTPKCALKM

SEQ ID NO: 172326 - protein, 9 aa, Homo Sapiens
KTPLKKFLL

SEQ ID NO: 172327 - protein, 9 aa, Homo Sapiens
KTPMENIGL

SEQ ID NO: 172328 - protein, 9 aa, Homo Sapiens
KTPNFSTLL

SEQ ID NO: 172329 - protein, 9 aa, Homo Sapiens
KTPPRVLTL

SEQ ID NO: 172330 - protein, 9 aa, Homo Sapiens
KTPQYKASL

SEQ ID NO: 172331 - protein, 9 aa, Homo Sapiens
KTSTQKFFL

SEQ ID NO: 172332 - protein, 9 aa, Homo Sapiens
KTTNAKVAL

SEQ ID NO: 172333 - protein, 9 aa, Homo Sapiens
KTVDQHMKL

SEQ ID NO: 172334 - protein, 9 aa, Homo Sapiens
KTVEQHLRL

SEQ ID NO: 172335 - protein, 9 aa, Homo Sapiens
KTVIGKARL

SEQ ID NO: 172336 - protein, 9 aa, Homo Sapiens
KTVNERITL

SEQ ID NO: 172337 - protein, 9 aa, Homo Sapiens
KVADHRVKL

SEQ ID NO: 172338 - protein, 9 aa, Homo Sapiens
KVADSKTLL

SEQ ID NO: 172339 - protein, 9 aa, Homo Sapiens
KVIAQQVQL

SEQ ID NO: 172340 - protein, 9 aa, Homo Sapiens
KVIDRKVEL

SEQ ID NO: 172341 - protein, 9 aa, Homo Sapiens
KVIEEAVYF

SEQ ID NO: 172342 - protein, 9 aa, Homo Sapiens
KVIEEKHQL

SEQ ID NO: 172343 - protein, 9 aa, Homo Sapiens
KVIEINPYL

SEQ ID NO: 172344 - protein, 9 aa, Homo Sapiens
KVIKSNIRL

SEQ ID NO: 172345 - protein, 9 aa, Homo Sapiens
KVISSNTSL

SEQ ID NO: 172346 - protein, 9 aa, Homo Sapiens
KVPAELICL

SEQ ID NO: 172347 - protein, 9 aa, Homo Sapiens
KVPAESPTL

SEQ ID NO: 172348 - protein, 9 aa, Homo Sapiens
KVPEKKLKL

SEQ ID NO: 172349 - protein, 9 aa, Homo Sapiens
KVPHDPVAL

SEQ ID NO: 172350 - protein, 9 aa, Homo Sapiens
KVPKERLAL

SEQ ID NO: 172351 - protein, 9 aa, Homo Sapiens
KVPLQYNEL

SEQ ID NO: 172352 - protein, 9 aa, Homo Sapiens
KVPNQYTHL

SEQ ID NO: 172353 - protein, 9 aa, Homo Sapiens
KVPSTPVHL

SEQ ID NO: 172354 - protein, 9 aa, Homo Sapiens
KVPTFVRML

SEQ ID NO: 172355 - protein, 9 aa, Homo Sapiens
KVPTTKSTL

SEQ ID NO: 172356 - protein, 9 aa, Homo Sapiens
KVPVHVIRM

SEQ ID NO: 172357 - protein, 9 aa, Homo Sapiens
KVVAKGLGL

SEQ ID NO: 172358 - protein, 9 aa, Homo Sapiens
KVVDDTLEL

SEQ ID NO: 172359 - protein, 9 aa, Homo Sapiens
KVVGKDYLL

SEQ ID NO: 172360 - protein, 9 aa, Homo Sapiens
KVVKLHTKL

SEQ ID NO: 172361 - protein, 9 aa, Homo Sapiens
KVVSQYHEL

SEQ ID NO: 172362 - protein, 9 aa, Homo Sapiens
KVVSQYSSL

SEQ ID NO: 172363 - protein, 9 aa, Homo Sapiens
KVVTRHPDL

SEQ ID NO: 172364 - protein, 9 aa, Homo Sapiens
KVVVHPLVL

SEQ ID NO: 172365 - protein, 9 aa, Homo Sapiens
KWPETPLLL

SEQ ID NO: 172366 - protein, 9 aa, Homo Sapiens
KYIDKTIRV

SEQ ID NO: 172367 - protein, 9 aa, Homo Sapiens
KYIGENLQL

SEQ ID NO: 172368 - protein, 9 aa, Homo Sapiens
KYIHSANVL

SEQ ID NO: 172369 - protein, 9 aa, Homo Sapiens
KYPASTVQI

SEQ ID NO: 172370 - protein, 9 aa, Homo Sapiens
KYPDNQVKL

SEQ ID NO: 172371 - protein, 9 aa, Homo Sapiens
KYPENFFLL

SEQ ID NO: 172372 - protein, 9 aa, Homo Sapiens
KYPFIPLLL

SEQ ID NO: 172373 - protein, 9 aa, Homo Sapiens
KYPHYFPLL

SEQ ID NO: 172374 - protein, 9 aa, Homo Sapiens
KYPHYFPVM

SEQ ID NO: 172375 - protein, 9 aa, Homo Sapiens
KYPPSATTL

SEQ ID NO: 172376 - protein, 9 aa, Homo Sapiens
KYPQAIYTL

SEQ ID NO: 172377 - protein, 9 aa, Homo Sapiens
KYPTLPGKL

SEQ ID NO: 172378 - protein, 9 aa, Homo Sapiens
KYPVGVHFL

SEQ ID NO: 172379 - protein, 9 aa, Homo Sapiens
KYPVHIYRL

SEQ ID NO: 172380 - protein, 9 aa, Homo Sapiens
KYPYVAVML

SEQ ID NO: 172381 - protein, 9 aa, Homo Sapiens
KYVQDNIQL

SEQ ID NO: 172382 - protein, 9 aa, Homo Sapiens
LAPQNKPEL

SEQ ID NO: 172383 - protein, 9 aa, Homo Sapiens
LIIGKKFKL

SEQ ID NO: 172384 - protein, 9 aa, Homo Sapiens
LIVDRPVTL

SEQ ID NO: 172385 - protein, 9 aa, Homo Sapiens
LLPNGKLIL

SEQ ID NO: 172386 - protein, 9 aa, Homo Sapiens
LQINDKIAL

SEQ ID NO: 172387 - protein, 9 aa, Homo Sapiens
LQPKQPLRL

SEQ ID NO: 172388 - protein, 9 aa, Homo Sapiens
LRRPLLHEL

SEQ ID NO: 172389 - protein, 9 aa, Homo Sapiens
LSLLKSHPK

SEQ ID NO: 172390 - protein, 9 aa, Homo Sapiens
LSPHKYYFL

SEQ ID NO: 172391 - protein, 9 aa, Homo Sapiens
LSPKEFYEL

SEQ ID NO: 172392 - protein, 9 aa, Homo Sapiens
LSPKSYYEL

SEQ ID NO: 172393 - protein, 9 aa, Homo Sapiens
LYPDHFHLL

SEQ ID NO: 172394 - protein, 9 aa, Homo Sapiens
LYPSGTLKL

SEQ ID NO: 172395 - protein, 9 aa, Homo Sapiens
MAPRTLFLL

SEQ ID NO: 172396 - protein, 9 aa, Homo Sapiens
MFPEMSIHL

SEQ ID NO: 172397 - protein, 9 aa, Homo Sapiens
MLPGLALLL

SEQ ID NO: 172398 - protein, 9 aa, Homo Sapiens
MLPPKKFVL

SEQ ID NO: 172399 - protein, 9 aa, Homo Sapiens
MQPFNYVTL

SEQ ID NO: 172400 - protein, 9 aa, Homo Sapiens
MQPTHPIRL

SEQ ID NO: 172401 - protein, 9 aa, Homo Sapiens
MRPRKAFLL

SEQ ID NO: 172402 - protein, 9 aa, Homo Sapiens
MSPNSYIKL

SEQ ID NO: 172403 - protein, 9 aa, Homo Sapiens
NIIAKKIVL

SEQ ID NO: 172404 - protein, 9 aa, Homo Sapiens
NIPAGKPSL

SEQ ID NO: 172405 - protein, 9 aa, Homo Sapiens
NIPEKKLIL

SEQ ID NO: 172406 - protein, 9 aa, Homo Sapiens
NQVKGKPDL

SEQ ID NO: 172407 - protein, 9 aa, Homo Sapiens
NYPDEFTKL

SEQ ID NO: 172408 - protein, 9 aa, Homo Sapiens
PLAPAPVFI

SEQ ID NO: 172409 - protein, 9 aa, Homo Sapiens
QAPKDSFAL

SEQ ID NO: 172410 - protein, 9 aa, Homo Sapiens
QFPGGSIDL

SEQ ID NO: 172411 - protein, 9 aa, Homo Sapiens
QFVKDSIRL

SEQ ID NO: 172412 - protein, 9 aa, Homo Sapiens
QGPPERVVL

SEQ ID NO: 172413 - protein, 9 aa, Homo Sapiens
QIIHQKPKL

SEQ ID NO: 172414 - protein, 9 aa, Homo Sapiens
QIPENGLTL

SEQ ID NO: 172415 - protein, 9 aa, Homo Sapiens
QIVKEKVHL

SEQ ID NO: 172416 - protein, 9 aa, Homo Sapiens
QKPSYYVRL

SEQ ID NO: 172417 - protein, 9 aa, Homo Sapiens
QLIAKKIKL

SEQ ID NO: 172418 - protein, 9 aa, Homo Sapiens
QLIEKRLNL

SEQ ID NO: 172419 - protein, 9 aa, Homo Sapiens
QLPLVKPYL

SEQ ID NO: 172420 - protein, 9 aa, Homo Sapiens
QLPYNGVVL

SEQ ID NO: 172421 - protein, 9 aa, Homo Sapiens
QMPKVHIEF

SEQ ID NO: 172422 - protein, 9 aa, Homo Sapiens
QSINKKLEL

SEQ ID NO: 172423 - protein, 9 aa, Homo Sapiens
QVIKEKLRL

SEQ ID NO: 172424 - protein, 9 aa, Homo Sapiens
RAIQKKIDL

SEQ ID NO: 172425 - protein, 9 aa, Homo Sapiens
RAPAEFIRF

SEQ ID NO: 172426 - protein, 9 aa, Homo Sapiens
RAPAQNPEL

SEQ ID NO: 172427 - protein, 9 aa, Homo Sapiens
RCAPASIRL

SEQ ID NO: 172428 - protein, 9 aa, Homo Sapiens
RCIKETLRL

SEQ ID NO: 172429 - protein, 9 aa, Homo Sapiens
RFPDENFKL

SEQ ID NO: 172430 - protein, 9 aa, Homo Sapiens
RFPDENFTL

SEQ ID NO: 172431 - protein, 9 aa, Homo Sapiens
RFPDGTNGL

SEQ ID NO: 172432 - protein, 9 aa, Homo Sapiens
RFPFSRPEL

SEQ ID NO: 172433 - protein, 9 aa, Homo Sapiens
RFPHHDNEL

SEQ ID NO: 172434 - protein, 9 aa, Homo Sapiens
RFPKAPSKL

SEQ ID NO: 172435 - protein, 9 aa, Homo Sapiens
RFPNFTNQL

SEQ ID NO: 172436 - protein, 9 aa, Homo Sapiens
RFPQHYKSL

SEQ ID NO: 172437 - protein, 9 aa, Homo Sapiens
RFPTQHQRL

SEQ ID NO: 172438 - protein, 9 aa, Homo Sapiens
RGPAHKLAL

SEQ ID NO: 172439 - protein, 9 aa, Homo Sapiens
RGPGWRPLL

SEQ ID NO: 172440 - protein, 9 aa, Homo Sapiens
RGPLAKIWL

SEQ ID NO: 172441 - protein, 9 aa, Homo Sapiens
RGPLKCVKL

SEQ ID NO: 172442 - protein, 9 aa, Homo Sapiens
RGPPARVTL

SEQ ID NO: 172443 - protein, 9 aa, Homo Sapiens
RGPPQRPKL

SEQ ID NO: 172444 - protein, 9 aa, Homo Sapiens
RGPRDCVVL

SEQ ID NO: 172445 - protein, 9 aa, Homo Sapiens
RGVDNKIRL

SEQ ID NO: 172446 - protein, 9 aa, Homo Sapiens
RHPAATAQL

SEQ ID NO: 172447 - protein, 9 aa, Homo Sapiens
RHPASSVAL

SEQ ID NO: 172448 - protein, 9 aa, Homo Sapiens
RHPKYKTEL

SEQ ID NO: 172449 - protein, 9 aa, Homo Sapiens
RHPREVVIL

SEQ ID NO: 172450 - protein, 9 aa, Homo Sapiens
RHPSQTVEL

SEQ ID NO: 172451 - protein, 9 aa, Homo Sapiens
RHPSTNSLL

SEQ ID NO: 172452 - protein, 9 aa, Homo Sapiens
RIAEFTTNL

SEQ ID NO: 172453 - protein, 9 aa, Homo Sapiens
RIAGEASRL

SEQ ID NO: 172454 - protein, 9 aa, Homo Sapiens
RIAPAFSSM

SEQ ID NO: 172455 - protein, 9 aa, Homo Sapiens
RIAPRPYRL

SEQ ID NO: 172456 - protein, 9 aa, Homo Sapiens
RIAQLRFLL

SEQ ID NO: 172457 - protein, 9 aa, Homo Sapiens
RIEKNPARL

SEQ ID NO: 172458 - protein, 9 aa, Homo Sapiens
RIHDKAVAL

SEQ ID NO: 172459 - protein, 9 aa, Homo Sapiens
RIIAHAQLL

SEQ ID NO: 172460 - protein, 9 aa, Homo Sapiens
RIIKETQRL

SEQ ID NO: 172461 - protein, 9 aa, Homo Sapiens
RIIPRHLQL

SEQ ID NO: 172462 - protein, 9 aa, Homo Sapiens
RIIQDRVSL

SEQ ID NO: 172463 - protein, 9 aa, Homo Sapiens
RIIRKVVKL

SEQ ID NO: 172464 - protein, 9 aa, Homo Sapiens
RINHYQQRL

SEQ ID NO: 172465 - protein, 9 aa, Homo Sapiens
RIPAHRFVL

SEQ ID NO: 172466 - protein, 9 aa, Homo Sapiens
RIPATPVVI

SEQ ID NO: 172467 - protein, 9 aa, Homo Sapiens
RIPDQLGYL

SEQ ID NO: 172468 - protein, 9 aa, Homo Sapiens
RIPDRPYSL

SEQ ID NO: 172469 - protein, 9 aa, Homo Sapiens
RIPKEQGVL

SEQ ID NO: 172470 - protein, 9 aa, Homo Sapiens
RIPNRGIDL

SEQ ID NO: 172471 - protein, 9 aa, Homo Sapiens
RIPPVAVRL

SEQ ID NO: 172472 - protein, 9 aa, Homo Sapiens
RIPQEKCIL

SEQ ID NO: 172473 - protein, 9 aa, Homo Sapiens
RIPSFVTEL

SEQ ID NO: 172474 - protein, 9 aa, Homo Sapiens
RISNPPILL

SEQ ID NO: 172475 - protein, 9 aa, Homo Sapiens
RITPRHLQL

SEQ ID NO: 172476 - protein, 9 aa, Homo Sapiens
RITTEKMLL

SEQ ID NO: 172477 - protein, 9 aa, Homo Sapiens
RIVAHAVEV

SEQ ID NO: 172478 - protein, 9 aa, Homo Sapiens
RIVDVRPTL

SEQ ID NO: 172479 - protein, 9 aa, Homo Sapiens
RIVPEPVQF

SEQ ID NO: 172480 - protein, 9 aa, Homo Sapiens
RIVVEHIIM

SEQ ID NO: 172481 - protein, 9 aa, Homo Sapiens
RKIKGVIEL

SEQ ID NO: 172482 - protein, 9 aa, Homo Sapiens
RKPDNYMTL

SEQ ID NO: 172483 - protein, 9 aa, Homo Sapiens
RKPPEVVRL

SEQ ID NO: 172484 - protein, 9 aa, Homo Sapiens
RKPPTSIRL

SEQ ID NO: 172485 - protein, 9 aa, Homo Sapiens
RLAQEAVTL

SEQ ID NO: 172486 - protein, 9 aa, Homo Sapiens
RLHLPPVRL

SEQ ID NO: 172487 - protein, 9 aa, Homo Sapiens
RLIAQRYLL

SEQ ID NO: 172488 - protein, 9 aa, Homo Sapiens
RLIERKSDL

SEQ ID NO: 172489 - protein, 9 aa, Homo Sapiens
RLINQVLEL

SEQ ID NO: 172490 - protein, 9 aa, Homo Sapiens
RLLKSKLYL

SEQ ID NO: 172491 - protein, 9 aa, Homo Sapiens
RLPAWQPIL

SEQ ID NO: 172492 - protein, 9 aa, Homo Sapiens
RLPDEKVEL

SEQ ID NO: 172493 - protein, 9 aa, Homo Sapiens
RLPDGRVVL

SEQ ID NO: 172494 - protein, 9 aa, Homo Sapiens
RLPDQFSKL

SEQ ID NO: 172495 - protein, 9 aa, Homo Sapiens
RLPEIYIQL

SEQ ID NO: 172496 - protein, 9 aa, Homo Sapiens
RLPHHSAIL

SEQ ID NO: 172497 - protein, 9 aa, Homo Sapiens
RLPKDFVDL

SEQ ID NO: 172498 - protein, 9 aa, Homo Sapiens
RLPPPFPGL

SEQ ID NO: 172499 - protein, 9 aa, Homo Sapiens
RLPPYSSQL

SEQ ID NO: 172500 - protein, 9 aa, Homo Sapiens
RLPQYQTDL

SEQ ID NO: 172501 - protein, 9 aa, Homo Sapiens
RLPSGKVGF

SEQ ID NO: 172502 - protein, 9 aa, Homo Sapiens
RLVAMAVKL

SEQ ID NO: 172503 - protein, 9 aa, Homo Sapiens
RLVESKVEL

SEQ ID NO: 172504 - protein, 9 aa, Homo Sapiens
RLVKEYTVL

SEQ ID NO: 172505 - protein, 9 aa, Homo Sapiens
RMAGRALEL

SEQ ID NO: 172506 - protein, 9 aa, Homo Sapiens
RMIKPRIVL

SEQ ID NO: 172507 - protein, 9 aa, Homo Sapiens
RMPAEIVVL

SEQ ID NO: 172508 - protein, 9 aa, Homo Sapiens
RMPCHKPYL

SEQ ID NO: 172509 - protein, 9 aa, Homo Sapiens
RMPDGPVAL

SEQ ID NO: 172510 - protein, 9 aa, Homo Sapiens
RMPRCGIRL

SEQ ID NO: 172511 - protein, 9 aa, Homo Sapiens
RMVASKMEL

SEQ ID NO: 172512 - protein, 9 aa, Homo Sapiens
RNIVKKFLM

SEQ ID NO: 172513 - protein, 9 aa, Homo Sapiens
RNPKNYLSL

SEQ ID NO: 172514 - protein, 9 aa, Homo Sapiens
RNPQSYLYL

SEQ ID NO: 172515 - protein, 9 aa, Homo Sapiens
RQIKDRVTM

SEQ ID NO: 172516 - protein, 9 aa, Homo Sapiens
RQIPWKLGL

SEQ ID NO: 172517 - protein, 9 aa, Homo Sapiens
RQPDLVLRL

SEQ ID NO: 172518 - protein, 9 aa, Homo Sapiens
RQPDTPTEL

SEQ ID NO: 172519 - protein, 9 aa, Homo Sapiens
RQPEFRAVL

SEQ ID NO: 172520 - protein, 9 aa, Homo Sapiens
RQPNPPLIL

SEQ ID NO: 172521 - protein, 9 aa, Homo Sapiens
RQPPESLKL

SEQ ID NO: 172522 - protein, 9 aa, Homo Sapiens
RQPPPRPFL

SEQ ID NO: 172523 - protein, 9 aa, Homo Sapiens
RQPYAVSEL

SEQ ID NO: 172524 - protein, 9 aa, Homo Sapiens
RQVDSHVEL

SEQ ID NO: 172525 - protein, 9 aa, Homo Sapiens
RRIEVNVEL

SEQ ID NO: 172526 - protein, 9 aa, Homo Sapiens
RRPNCGIRL

SEQ ID NO: 172527 - protein, 9 aa, Homo Sapiens
RRPYVRVEL

SEQ ID NO: 172528 - protein, 9 aa, Homo Sapiens
RSIEQKYKL

SEQ ID NO: 172529 - protein, 9 aa, Homo Sapiens
RSPAKRLQL

SEQ ID NO: 172530 - protein, 9 aa, Homo Sapiens
RSPDRNLLL

SEQ ID NO: 172531 - protein, 9 aa, Homo Sapiens
RSPEEWPNL

SEQ ID NO: 172532 - protein, 9 aa, Homo Sapiens
RSPFSFVYL

SEQ ID NO: 172533 - protein, 9 aa, Homo Sapiens
RSPGRAYAL

SEQ ID NO: 172534 - protein, 9 aa, Homo Sapiens
RSPMHRVTL

SEQ ID NO: 172535 - protein, 9 aa, Homo Sapiens
RSPPIKPLL

SEQ ID NO: 172536 - protein, 9 aa, Homo Sapiens
RSPPRALVL

SEQ ID NO: 172537 - protein, 9 aa, Homo Sapiens
RSPSKNIYL

SEQ ID NO: 172538 - protein, 9 aa, Homo Sapiens
RSPTAWHRL

SEQ ID NO: 172539 - protein, 9 aa, Homo Sapiens
RSPTKAPHL

SEQ ID NO: 172540 - protein, 9 aa, Homo Sapiens
RSPVTKIML

SEQ ID NO: 172541 - protein, 9 aa, Homo Sapiens
RSPVVHSVL

SEQ ID NO: 172542 - protein, 9 aa, Homo Sapiens
RSPVYLTVL

SEQ ID NO: 172543 - protein, 9 aa, Homo Sapiens
RSVKVKIKL

SEQ ID NO: 172544 - protein, 9 aa, Homo Sapiens
RTCAVHITL

SEQ ID NO: 172545 - protein, 9 aa, Homo Sapiens
RTIAKRLVL

SEQ ID NO: 172546 - protein, 9 aa, Homo Sapiens
RTIPGKQQL

SEQ ID NO: 172547 - protein, 9 aa, Homo Sapiens
RTPSGKLRL

SEQ ID NO: 172548 - protein, 9 aa, Homo Sapiens
RTPYHVNLL

SEQ ID NO: 172549 - protein, 9 aa, Homo Sapiens
RTVDARLKL

SEQ ID NO: 172550 - protein, 9 aa, Homo Sapiens
RVAIKKIVL

SEQ ID NO: 172551 - protein, 9 aa, Homo Sapiens
RVCDYHTKL

SEQ ID NO: 172552 - protein, 9 aa, Homo Sapiens
RVIDYILDL

SEQ ID NO: 172553 - protein, 9 aa, Homo Sapiens
RVIKNSIRL

SEQ ID NO: 172554 - protein, 9 aa, Homo Sapiens
RVPAHAVVV

SEQ ID NO: 172555 - protein, 9 aa, Homo Sapiens
RVPAHRNLL

SEQ ID NO: 172556 - protein, 9 aa, Homo Sapiens
RVPAKSTLL

SEQ ID NO: 172557 - protein, 9 aa, Homo Sapiens
RVPIAKILL

SEQ ID NO: 172558 - protein, 9 aa, Homo Sapiens
RVPKDRPSL

SEQ ID NO: 172559 - protein, 9 aa, Homo Sapiens
RVPKSKLEV

SEQ ID NO: 172560 - protein, 9 aa, Homo Sapiens
RVPQEAVKL

SEQ ID NO: 172561 - protein, 9 aa, Homo Sapiens
RVPSPKVVL

SEQ ID NO: 172562 - protein, 9 aa, Homo Sapiens
RVPTASYDL

SEQ ID NO: 172563 - protein, 9 aa, Homo Sapiens
RVSSSKISL

SEQ ID NO: 172564 - protein, 9 aa, Homo Sapiens
RVTDRNITL

SEQ ID NO: 172565 - protein, 9 aa, Homo Sapiens
RVVLKRVLL

SEQ ID NO: 172566 - protein, 9 aa, Homo Sapiens
RVVPVRLDL

SEQ ID NO: 172567 - protein, 9 aa, Homo Sapiens
RYPCFFNTL

SEQ ID NO: 172568 - protein, 9 aa, Homo Sapiens
RYPDPLIKV

SEQ ID NO: 172569 - protein, 9 aa, Homo Sapiens
RYPDSHQLF

SEQ ID NO: 172570 - protein, 9 aa, Homo Sapiens
RYPEGGQIL

SEQ ID NO: 172571 - protein, 9 aa, Homo Sapiens
RYPPAANEL

SEQ ID NO: 172572 - protein, 9 aa, Homo Sapiens
RYPRESNKL

SEQ ID NO: 172573 - protein, 9 aa, Homo Sapiens
RYPTSIASL

SEQ ID NO: 172574 - protein, 9 aa, Homo Sapiens
RYPTTFVMV

SEQ ID NO: 172575 - protein, 9 aa, Homo Sapiens
SAPAKKIKL

SEQ ID NO: 172576 - protein, 9 aa, Homo Sapiens
SFPCHQTKL

SEQ ID NO: 172577 - protein, 9 aa, Homo Sapiens
SFPEKKPRL

SEQ ID NO: 172578 - protein, 9 aa, Homo Sapiens
SFPLVTVHL

SEQ ID NO: 172579 - protein, 9 aa, Homo Sapiens
SFPPPGVKL

SEQ ID NO: 172580 - protein, 9 aa, Homo Sapiens
SFPSEPVKL

SEQ ID NO: 172581 - protein, 9 aa, Homo Sapiens
SGPKSKLKL

SEQ ID NO: 172582 - protein, 9 aa, Homo Sapiens
SIPALTATL

SEQ ID NO: 172583 - protein, 9 aa, Homo Sapiens
SIPKDKQML

SEQ ID NO: 172584 - protein, 9 aa, Homo Sapiens
SIPTKALEL

SEQ ID NO: 172585 - protein, 9 aa, Homo Sapiens
SITKNTAKL

SEQ ID NO: 172586 - protein, 9 aa, Homo Sapiens
SIVDYKPNL

SEQ ID NO: 172587 - protein, 9 aa, Homo Sapiens
SKIKGKPVL

SEQ ID NO: 172588 - protein, 9 aa, Homo Sapiens
SLIGEKVCL

SEQ ID NO: 172589 - protein, 9 aa, Homo Sapiens
SLIKHKIML

SEQ ID NO: 172590 - protein, 9 aa, Homo Sapiens
SLITNKVIM

SEQ ID NO: 172591 - protein, 9 aa, Homo Sapiens
SLIVGGVDL

SEQ ID NO: 172592 - protein, 9 aa, Homo Sapiens
SLPASKQML

SEQ ID NO: 172593 - protein, 9 aa, Homo Sapiens
SLPDIKVYL

SEQ ID NO: 172594 - protein, 9 aa, Homo Sapiens
SLPGVALTL

SEQ ID NO: 172595 - protein, 9 aa, Homo Sapiens
SLPKPTIIL

SEQ ID NO: 172596 - protein, 9 aa, Homo Sapiens
SLPRFQVTL

SEQ ID NO: 172597 - protein, 9 aa, Homo Sapiens
SLPSTKPQL

SEQ ID NO: 172598 - protein, 9 aa, Homo Sapiens
SLTPVTLVL

SEQ ID NO: 172599 - protein, 9 aa, Homo Sapiens
SLVEYKPEL

SEQ ID NO: 172600 - protein, 9 aa, Homo Sapiens
SMPDHSIHL

SEQ ID NO: 172601 - protein, 9 aa, Homo Sapiens
SMVHKRINL

SEQ ID NO: 172602 - protein, 9 aa, Homo Sapiens
SMVIQKIYL

SEQ ID NO: 172603 - protein, 9 aa, Homo Sapiens
SNIEEKIKL

SEQ ID NO: 172604 - protein, 9 aa, Homo Sapiens
SNIYSKFLL

SEQ ID NO: 172605 - protein, 9 aa, Homo Sapiens
SQPGVAIGL

SEQ ID NO: 172606 - protein, 9 aa, Homo Sapiens
SRPGKNVQL

SEQ ID NO: 172607 - protein, 9 aa, Homo Sapiens
SRPKSNIVL

SEQ ID NO: 172608 - protein, 9 aa, Homo Sapiens
SRPLSAVVL

SEQ ID NO: 172609 - protein, 9 aa, Homo Sapiens
SRPRVVIQL

SEQ ID NO: 172610 - protein, 9 aa, Homo Sapiens
SSIKDKIVL

SEQ ID NO: 172611 - protein, 9 aa, Homo Sapiens
SSPKGKFSL

SEQ ID NO: 172612 - protein, 9 aa, Homo Sapiens
SSPKQYMQL

SEQ ID NO: 172613 - protein, 9 aa, Homo Sapiens
SSVISKIDL

SEQ ID NO: 172614 - protein, 9 aa, Homo Sapiens
STIGQKIAL

SEQ ID NO: 172615 - protein, 9 aa, Homo Sapiens
STITSKMNL

SEQ ID NO: 172616 - protein, 9 aa, Homo Sapiens
STPKHYIRF

SEQ ID NO: 172617 - protein, 9 aa, Homo Sapiens
STPSGYLEL

SEQ ID NO: 172618 - protein, 9 aa, Homo Sapiens
STPTEKPKL

SEQ ID NO: 172619 - protein, 9 aa, Homo Sapiens
STVTTKVTL

SEQ ID NO: 172620 - protein, 9 aa, Homo Sapiens
SVIDEPVRL

SEQ ID NO: 172621 - protein, 9 aa, Homo Sapiens
SVIPDKPSL

SEQ ID NO: 172622 - protein, 9 aa, Homo Sapiens
SVIYKKFQL

SEQ ID NO: 172623 - protein, 9 aa, Homo Sapiens
SVPKHKLTL

SEQ ID NO: 172624 - protein, 9 aa, Homo Sapiens
SVPNKALEL

SEQ ID NO: 172625 - protein, 9 aa, Homo Sapiens
SVPQIHVNL

SEQ ID NO: 172626 - protein, 9 aa, Homo Sapiens
SVVKGRLHL

SEQ ID NO: 172627 - protein, 9 aa, Homo Sapiens
SYPHHATQL

SEQ ID NO: 172628 - protein, 9 aa, Homo Sapiens
TFPNNPVEL

SEQ ID NO: 172629 - protein, 9 aa, Homo Sapiens
TFPQNPVEL

SEQ ID NO: 172630 - protein, 9 aa, Homo Sapiens
TFPVHRQKL

SEQ ID NO: 172631 - protein, 9 aa, Homo Sapiens
THPFKTIEL

SEQ ID NO: 172632 - protein, 9 aa, Homo Sapiens
TIILSKMML

SEQ ID NO: 172633 - protein, 9 aa, Homo Sapiens
TIPKHRHLL

SEQ ID NO: 172634 - protein, 9 aa, Homo Sapiens
TIVTDGIQL

SEQ ID NO: 172635 - protein, 9 aa, Homo Sapiens
TLPEGCVVL

SEQ ID NO: 172636 - protein, 9 aa, Homo Sapiens
TLPPGSVLL

SEQ ID NO: 172637 - protein, 9 aa, Homo Sapiens
TLPPQKPEL

SEQ ID NO: 172638 - protein, 9 aa, Homo Sapiens
TLVKNCIVL

SEQ ID NO: 172639 - protein, 9 aa, Homo Sapiens
TMPPTTVIL

SEQ ID NO: 172640 - protein, 9 aa, Homo Sapiens
TMVKKKVVF

SEQ ID NO: 172641 - protein, 9 aa, Homo Sapiens
TNVINKIIL

SEQ ID NO: 172642 - protein, 9 aa, Homo Sapiens
TQPERYIHL

SEQ ID NO: 172643 - protein, 9 aa, Homo Sapiens
TRPEKALIL

SEQ ID NO: 172644 - protein, 9 aa, Homo Sapiens
TRPKMSIVL

SEQ ID NO: 172645 - protein, 9 aa, Homo Sapiens
TTILYKLKL

SEQ ID NO: 172646 - protein, 9 aa, Homo Sapiens
TTPKHYIRF

SEQ ID NO: 172647 - protein, 9 aa, Homo Sapiens
TTPQCKYLL

SEQ ID NO: 172648 - protein, 9 aa, Homo Sapiens
TVIATNILL

SEQ ID NO: 172649 - protein, 9 aa, Homo Sapiens
TYPGPAVVL

SEQ ID NO: 172650 - protein, 9 aa, Homo Sapiens
VAPEEHPVL

SEQ ID NO: 172651 - protein, 9 aa, Homo Sapiens
VAPPGCSHL

SEQ ID NO: 172652 - protein, 9 aa, Homo Sapiens
VFPHLTVVL

SEQ ID NO: 172653 - protein, 9 aa, Homo Sapiens
VFPKEPVEL

SEQ ID NO: 172654 - protein, 9 aa, Homo Sapiens
VFPSMPIKL

SEQ ID NO: 172655 - protein, 9 aa, Homo Sapiens
VIAPNPAQL

SEQ ID NO: 172656 - protein, 9 aa, Homo Sapiens
VIIGKTVTL

SEQ ID NO: 172657 - protein, 9 aa, Homo Sapiens
VIIGTKTIL

SEQ ID NO: 172658 - protein, 9 aa, Homo Sapiens
VINPEPITL

SEQ ID NO: 172659 - protein, 9 aa, Homo Sapiens
VIPESVILL

SEQ ID NO: 172660 - protein, 9 aa, Homo Sapiens
VIPKSKFVL

SEQ ID NO: 172661 - protein, 9 aa, Homo Sapiens
VIPPCKSEL

SEQ ID NO: 172662 - protein, 9 aa, Homo Sapiens
VIPRITIEM

SEQ ID NO: 172663 - protein, 9 aa, Homo Sapiens
VIPSTGIKL

SEQ ID NO: 172664 - protein, 9 aa, Homo Sapiens
VIPTNVPEL

SEQ ID NO: 172665 - protein, 9 aa, Homo Sapiens
VITKTGAKL

SEQ ID NO: 172666 - protein, 9 aa, Homo Sapiens
VLPKLYVKL

SEQ ID NO: 172667 - protein, 9 aa, Homo Sapiens
VLPKSRVEL

SEQ ID NO: 172668 - protein, 9 aa, Homo Sapiens
VLPNIHPEL

SEQ ID NO: 172669 - protein, 9 aa, Homo Sapiens
VLPNTALHL

SEQ ID NO: 172670 - protein, 9 aa, Homo Sapiens
VLPPEPVQL

SEQ ID NO: 172671 - protein, 9 aa, Homo Sapiens
VLPPTCIQL

SEQ ID NO: 172672 - protein, 9 aa, Homo Sapiens
VLPVKKPKM

SEQ ID NO: 172673 - protein, 9 aa, Homo Sapiens
VMAPRTLFL

SEQ ID NO: 172674 - protein, 9 aa, Homo Sapiens
VMPKKRQAL

SEQ ID NO: 172675 - protein, 9 aa, Homo Sapiens
VQPKSLVRL

SEQ ID NO: 172676 - protein, 9 aa, Homo Sapiens
VQPSKYHFL

SEQ ID NO: 172677 - protein, 9 aa, Homo Sapiens
VQPTHVIHL

SEQ ID NO: 172678 - protein, 9 aa, Homo Sapiens
VQPVVHPQL

SEQ ID NO: 172679 - protein, 9 aa, Homo Sapiens
VQVHSKFRL

SEQ ID NO: 172680 - protein, 9 aa, Homo Sapiens
VSPKKSTVL

SEQ ID NO: 172681 - protein, 9 aa, Homo Sapiens
VSPRQTLEL

SEQ ID NO: 172682 - protein, 9 aa, Homo Sapiens
VSTSHTTIS

SEQ ID NO: 172683 - protein, 9 aa, Homo Sapiens
VVAKDGLKL

SEQ ID NO: 172684 - protein, 9 aa, Homo Sapiens
VVAPAGITL

SEQ ID NO: 172685 - protein, 9 aa, Homo Sapiens
VVPDHPVLL

SEQ ID NO: 172686 - protein, 9 aa, Homo Sapiens
VVPKDRVAL

SEQ ID NO: 172687 - protein, 9 aa, Homo Sapiens
VYIKHPVSL

SEQ ID NO: 172688 - protein, 9 aa, Homo Sapiens
YIIKDKHIL

SEQ ID NO: 172689 - protein, 10 aa, Homo Sapiens
AGDALLSLLA

SEQ ID NO: 172690 - protein, 10 aa, Homo Sapiens
KAPKPGGLSL

SEQ ID NO: 172691 - protein, 10 aa, Homo Sapiens
KFPAYERVLL

SEQ ID NO: 172692 - protein, 10 aa, Homo Sapiens
KIIDRAITSL

SEQ ID NO: 172693 - protein, 10 aa, Homo Sapiens
KIIEARLKMY

SEQ ID NO: 172694 - protein, 10 aa, Homo Sapiens
KIIEDLGVHF

SEQ ID NO: 172695 - protein, 10 aa, Homo Sapiens
KIPSSHPVSL

SEQ ID NO: 172696 - protein, 10 aa, Homo Sapiens
KISSVQPICL

SEQ ID NO: 172697 - protein, 10 aa, Homo Sapiens
KLLKCSRLVL

SEQ ID NO: 172698 - protein, 10 aa, Homo Sapiens
KLPATEKPVL

SEQ ID NO: 172699 - protein, 10 aa, Homo Sapiens
KLPGDKGLVL

SEQ ID NO: 172700 - protein, 10 aa, Homo Sapiens
KLPPGFPVKL

SEQ ID NO: 172701 - protein, 10 aa, Homo Sapiens
KLPSVPSTHL

SEQ ID NO: 172702 - protein, 10 aa, Homo Sapiens
KLWPLPKALL

SEQ ID NO: 172703 - protein, 10 aa, Homo Sapiens
KMPGPGCVFL

SEQ ID NO: 172704 - protein, 10 aa, Homo Sapiens
KMPSLQPVVM

SEQ ID NO: 172705 - protein, 10 aa, Homo Sapiens
KQPVGGGQKL

SEQ ID NO: 172706 - protein, 10 aa, Homo Sapiens
KTLDQAKAVL

SEQ ID NO: 172707 - protein, 10 aa, Homo Sapiens
KYPASTVQIL

SEQ ID NO: 172708 - protein, 10 aa, Homo Sapiens
KYVGSRPIKL

SEQ ID NO: 172709 - protein, 10 aa, Homo Sapiens
LRANGLLKII

SEQ ID NO: 172710 - protein, 10 aa, Homo Sapiens
PFADVAPLQL

SEQ ID NO: 172711 - protein, 10 aa, Homo Sapiens
PLSMAPPLSL

SEQ ID NO: 172712 - protein, 10 aa, Homo Sapiens
PPSKPPPVEL

SEQ ID NO: 172713 - protein, 10 aa, Homo Sapiens
PSFPVSTLKL

SEQ ID NO: 172714 - protein, 10 aa, Homo Sapiens
QSYPHHATQL

SEQ ID NO: 172715 - protein, 10 aa, Homo Sapiens
RFPNFTNQLL

SEQ ID NO: 172716 - protein, 10 aa, Homo Sapiens
RHPQPGAVEL

SEQ ID NO: 172717 - protein, 10 aa, Homo Sapiens
RIINLGPVML

SEQ ID NO: 172718 - protein, 10 aa, Homo Sapiens
RIPAEGRVAL

SEQ ID NO: 172719 - protein, 10 aa, Homo Sapiens
RLPYKAGLSL

SEQ ID NO: 172720 - protein, 10 aa, Homo Sapiens
RMDPLEAIQL

SEQ ID NO: 172721 - protein, 10 aa, Homo Sapiens
RRPKNVVLRL

SEQ ID NO: 172722 - protein, 10 aa, Homo Sapiens
RYPERPIIFL

SEQ ID NO: 172723 - protein, 10 aa, Homo Sapiens
RYPPFPSDYL

SEQ ID NO: 172724 - protein, 10 aa, Homo Sapiens
RYPVNSVNIL

SEQ ID NO: 172725 - protein, 10 aa, Homo Sapiens
THPPGPAVQL

SEQ ID NO: 172726 - protein, 10 aa, Homo Sapiens
TLDGLPPLRL

SEQ ID NO: 172727 - protein, 10 aa, Homo Sapiens
TYPGQPHPAL

SEQ ID NO: 172728 - protein, 10 aa, Homo Sapiens
TYPKGAGEML

SEQ ID NO: 172729 - protein, 11 aa, Homo Sapiens
KFPGPLENQRL

SEQ ID NO: 172730 - protein, 11 aa, Homo Sapiens
KFPSEYVPTVF

SEQ ID NO: 172731 - protein, 11 aa, Homo Sapiens
KIVPAKDLVLL

SEQ ID NO: 172732 - protein, 11 aa, Homo Sapiens
KLPATEKPVLL

SEQ ID NO: 172733 - protein, 11 aa, Homo Sapiens
KLPPTDAYYKL

SEQ ID NO: 172734 - protein, 11 aa, Homo Sapiens
KLPSGKLQVHL

SEQ ID NO: 172735 - protein, 11 aa, Homo Sapiens
KLPVANEYLLL

SEQ ID NO: 172736 - protein, 11 aa, Homo Sapiens
KMPQSMPEYAL

SEQ ID NO: 172737 - protein, 11 aa, Homo Sapiens
KSPASDTYIVF

SEQ ID NO: 172738 - protein, 11 aa, Homo Sapiens
KVPTYKDYVDL

SEQ ID NO: 172739 - protein, 11 aa, Homo Sapiens
PGSLIPEALRL

SEQ ID NO: 172740 - protein, 11 aa, Homo Sapiens
RIPHNNFYRKL

SEQ ID NO: 172741 - protein, 11 aa, Homo Sapiens
RPPSKPPPVEL

SEQ ID NO: 172742 - protein, 11 aa, Homo Sapiens
SSTISSNVASK

SEQ ID NO: 172743 - protein, 8 aa, Homo Sapiens
APISKVIR

SEQ ID NO: 172744 - protein, 8 aa, Homo Sapiens
APLSKVRL

SEQ ID NO: 172745 - protein, 8 aa, Homo Sapiens
EIADPIVL

SEQ ID NO: 172746 - protein, 8 aa, Homo Sapiens
GLPEPLML

SEQ ID NO: 172747 - protein, 8 aa, Homo Sapiens
GLPEPVTL

SEQ ID NO: 172748 - protein, 8 aa, Homo Sapiens
HRPPPIKL

SEQ ID NO: 172749 - protein, 8 aa, Homo Sapiens
IIAKKIVL

SEQ ID NO: 172750 - protein, 8 aa, Homo Sapiens
IIPRHLQL

SEQ ID NO: 172751 - protein, 8 aa, Homo Sapiens
IVKEKVHL

SEQ ID NO: 172752 - protein, 8 aa, Homo Sapiens
KFIEGVVL

SEQ ID NO: 172753 - protein, 8 aa, Homo Sapiens
KIADPFVL

SEQ ID NO: 172754 - protein, 8 aa, Homo Sapiens
KIPSPVKL

SEQ ID NO: 172755 - protein, 8 aa, Homo Sapiens
KKIGKPEI

SEQ ID NO: 172756 - protein, 8 aa, Homo Sapiens
KLPPVLVL

SEQ ID NO: 172757 - protein, 8 aa, Homo Sapiens
KVPFPLTL

SEQ ID NO: 172758 - protein, 8 aa, Homo Sapiens
LLPGPLEL

SEQ ID NO: 172759 - protein, 8 aa, Homo Sapiens
LLPGPVTL

SEQ ID NO: 172760 - protein, 8 aa, Homo Sapiens
LPKLYVKL

SEQ ID NO: 172761 - protein, 8 aa, Homo Sapiens
LPKSRVEL

SEQ ID NO: 172762 - protein, 8 aa, Homo Sapiens
LVKNKITL

SEQ ID NO: 172763 - protein, 8 aa, Homo Sapiens
PLPPAVFL

SEQ ID NO: 172764 - protein, 8 aa, Homo Sapiens
PQRKPLVL

SEQ ID NO: 172765 - protein, 8 aa, Homo Sapiens
PVPDPILL

SEQ ID NO: 172766 - protein, 8 aa, Homo Sapiens
QFPGAITL

SEQ ID NO: 172767 - protein, 8 aa, Homo Sapiens
QIPAAVKL

SEQ ID NO: 172768 - protein, 8 aa, Homo Sapiens
RFPEALRL

SEQ ID NO: 172769 - protein, 8 aa, Homo Sapiens
RIAKGLRL

SEQ ID NO: 172770 - protein, 8 aa, Homo Sapiens
RIIIPVLL

SEQ ID NO: 172771 - protein, 8 aa, Homo Sapiens
RIIPRHLQ

SEQ ID NO: 172772 - protein, 8 aa, Homo Sapiens
RIPEPVHL

SEQ ID NO: 172773 - protein, 8 aa, Homo Sapiens
RIRLPHLE

SEQ ID NO: 172774 - protein, 8 aa, Homo Sapiens
RLPPPTIL

SEQ ID NO: 172775 - protein, 8 aa, Homo Sapiens
RVPEAVEL

SEQ ID NO: 172776 - protein, 8 aa, Homo Sapiens
SIAGPVLL

SEQ ID NO: 172777 - protein, 8 aa, Homo Sapiens
SIAPPVPL

SEQ ID NO: 172778 - protein, 8 aa, Homo Sapiens
SLAPPLCL

SEQ ID NO: 172779 - protein, 8 aa, Homo Sapiens
SVKVKIKL

SEQ ID NO: 172780 - protein, 8 aa, Homo Sapiens
TGPPPLLL

SEQ ID NO: 172781 - protein, 8 aa, Homo Sapiens
TLPTPMVL

SEQ ID NO: 172782 - protein, 8 aa, Homo Sapiens
TVEQHLRL

SEQ ID NO: 172783 - protein, 8 aa, Homo Sapiens
VIDRKVEL

SEQ ID NO: 172784 - protein, 8 aa, Homo Sapiens
VIGPPVVL

SEQ ID NO: 172785 - protein, 8 aa, Homo Sapiens
VVPQAIEL

SEQ ID NO: 172786 - protein, 9 aa, Homo Sapiens
AGPAQFIEL

SEQ ID NO: 172787 - protein, 9 aa, Homo Sapiens
AGPPDTISL

SEQ ID NO: 172788 - protein, 9 aa, Homo Sapiens
AHPLETLIL

SEQ ID NO: 172789 - protein, 9 aa, Homo Sapiens
AIIDKYIKL

SEQ ID NO: 172790 - protein, 9 aa, Homo Sapiens
AIIKEPIDI

SEQ ID NO: 172791 - protein, 9 aa, Homo Sapiens
AIIRDRAAL

SEQ ID NO: 172792 - protein, 9 aa, Homo Sapiens
AIPKKKMNL

SEQ ID NO: 172793 - protein, 9 aa, Homo Sapiens
AITPAGINL

SEQ ID NO: 172794 - protein, 9 aa, Homo Sapiens
AIVAKQVLL

SEQ ID NO: 172795 - protein, 9 aa, Homo Sapiens
AIVNSALKL

SEQ ID NO: 172796 - protein, 9 aa, Homo Sapiens
ALPKLPISL

SEQ ID NO: 172797 - protein, 9 aa, Homo Sapiens
ALVKEKLRL

SEQ ID NO: 172798 - protein, 9 aa, Homo Sapiens
ASPTQPIQL

SEQ ID NO: 172799 - protein, 9 aa, Homo Sapiens
ATPLKKVIL

SEQ ID NO: 172800 - protein, 9 aa, Homo Sapiens
AVPEVAVYL

SEQ ID NO: 172801 - protein, 9 aa, Homo Sapiens
AVVARKLEL

SEQ ID NO: 172802 - protein, 9 aa, Homo Sapiens
DPFPAAIIL

SEQ ID NO: 172803 - protein, 9 aa, Homo Sapiens
EIIKQKLTL

SEQ ID NO: 172804 - protein, 9 aa, Homo Sapiens
EIISKGIKL

SEQ ID NO: 172805 - protein, 9 aa, Homo Sapiens
EIPELAIKL

SEQ ID NO: 172806 - protein, 9 aa, Homo Sapiens
ELLSKAVKL

SEQ ID NO: 172807 - protein, 9 aa, Homo Sapiens
ENRSLTIKL

SEQ ID NO: 172808 - protein, 9 aa, Homo Sapiens
GFPEGSVEL

SEQ ID NO: 172809 - protein, 9 aa, Homo Sapiens
GFPKVSILL

SEQ ID NO: 172810 - protein, 9 aa, Homo Sapiens
GKLPKGILL

SEQ ID NO: 172811 - protein, 9 aa, Homo Sapiens
GVPKTHLEL

SEQ ID NO: 172812 - protein, 9 aa, Homo Sapiens
HCVSAFVKL

SEQ ID NO: 172813 - protein, 9 aa, Homo Sapiens
HGPNHPLVL

SEQ ID NO: 172814 - protein, 9 aa, Homo Sapiens
HGPPEPVLL

SEQ ID NO: 172815 - protein, 9 aa, Homo Sapiens
HGVKDKPVL

SEQ ID NO: 172816 - protein, 9 aa, Homo Sapiens
HHPDYNNEL

SEQ ID NO: 172817 - protein, 9 aa, Homo Sapiens
HIEPLKIQL

SEQ ID NO: 172818 - protein, 9 aa, Homo Sapiens
HIIPRSLDL

SEQ ID NO: 172819 - protein, 9 aa, Homo Sapiens
HINIGALEL

SEQ ID NO: 172820 - protein, 9 aa, Homo Sapiens
HITPDNFEL

SEQ ID NO: 172821 - protein, 9 aa, Homo Sapiens
HIVVNKAEL

SEQ ID NO: 172822 - protein, 9 aa, Homo Sapiens
HLIEESVKL

SEQ ID NO: 172823 - protein, 9 aa, Homo Sapiens
HLPDVCVNL

SEQ ID NO: 172824 - protein, 9 aa, Homo Sapiens
HQIDNHIHL

SEQ ID NO: 172825 - protein, 9 aa, Homo Sapiens
HQPTTWVSF

SEQ ID NO: 172826 - protein, 9 aa, Homo Sapiens
HSPGDYILL

SEQ ID NO: 172827 - protein, 9 aa, Homo Sapiens
HSPPNKPKL

SEQ ID NO: 172828 - protein, 9 aa, Homo Sapiens
HTPHQFLLL

SEQ ID NO: 172829 - protein, 9 aa, Homo Sapiens
HTPHSNVIL

SEQ ID NO: 172830 - protein, 9 aa, Homo Sapiens
HVIHGGIVL

SEQ ID NO: 172831 - protein, 9 aa, Homo Sapiens
HVPCLKILL

SEQ ID NO: 172832 - protein, 9 aa, Homo Sapiens
HVPEHAVVL

SEQ ID NO: 172833 - protein, 9 aa, Homo Sapiens
IGFPCGILL

SEQ ID NO: 172834 - protein, 9 aa, Homo Sapiens
IHPPNYIVL

SEQ ID NO: 172835 - protein, 9 aa, Homo Sapiens
ILIETKLVL

SEQ ID NO: 172836 - protein, 9 aa, Homo Sapiens
ILPEDHLLL

SEQ ID NO: 172837 - protein, 9 aa, Homo Sapiens
IPSRVALIL

SEQ ID NO: 172838 - protein, 9 aa, Homo Sapiens
IQRTPKIQV

SEQ ID NO: 172839 - protein, 9 aa, Homo Sapiens
ISPKEFVHL

SEQ ID NO: 172840 - protein, 9 aa, Homo Sapiens
ISPKHFVHL

SEQ ID NO: 172841 - protein, 9 aa, Homo Sapiens
ITPPEKFFL

SEQ ID NO: 172842 - protein, 9 aa, Homo Sapiens
KAIDEYMKL

SEQ ID NO: 172843 - protein, 9 aa, Homo Sapiens
KAPAPPLVL

SEQ ID NO: 172844 - protein, 9 aa, Homo Sapiens
KAPASYTKI

SEQ ID NO: 172845 - protein, 9 aa, Homo Sapiens
KAPLSKVRL

SEQ ID NO: 172846 - protein, 9 aa, Homo Sapiens
KAPPDGWEL

SEQ ID NO: 172847 - protein, 9 aa, Homo Sapiens
KAPPIPLKL

SEQ ID NO: 172848 - protein, 9 aa, Homo Sapiens
KAPVNTAEL

SEQ ID NO: 172849 - protein, 9 aa, Homo Sapiens
KAVGDGIVL

SEQ ID NO: 172850 - protein, 9 aa, Homo Sapiens
KEIEEKLRL

SEQ ID NO: 172851 - protein, 9 aa, Homo Sapiens
KEVQDGIEL

SEQ ID NO: 172852 - protein, 9 aa, Homo Sapiens
KFIDKQLEL

SEQ ID NO: 172853 - protein, 9 aa, Homo Sapiens
KFPAYERVL

SEQ ID NO: 172854 - protein, 9 aa, Homo Sapiens
KFPDREFLL

SEQ ID NO: 172855 - protein, 9 aa, Homo Sapiens
KFPELNYQL

SEQ ID NO: 172856 - protein, 9 aa, Homo Sapiens
KFPGIRPYL

SEQ ID NO: 172857 - protein, 9 aa, Homo Sapiens
KFPHESARL

SEQ ID NO: 172858 - protein, 9 aa, Homo Sapiens
KFPIMNLQL

SEQ ID NO: 172859 - protein, 9 aa, Homo Sapiens
KFPIVNAEL

SEQ ID NO: 172860 - protein, 9 aa, Homo Sapiens
KFPLMTLQL

SEQ ID NO: 172861 - protein, 9 aa, Homo Sapiens
KFPLTRPSL

SEQ ID NO: 172862 - protein, 9 aa, Homo Sapiens
KFPPKFVQL

SEQ ID NO: 172863 - protein, 9 aa, Homo Sapiens
KFPSEPNRL

SEQ ID NO: 172864 - protein, 9 aa, Homo Sapiens
KFPTPASRL

SEQ ID NO: 172865 - protein, 9 aa, Homo Sapiens
KFPTTKLEM

SEQ ID NO: 172866 - protein, 9 aa, Homo Sapiens
KFPVKPADL

SEQ ID NO: 172867 - protein, 9 aa, Homo Sapiens
KFVNKSYLL

SEQ ID NO: 172868 - protein, 9 aa, Homo Sapiens
KFVVKKPEL

SEQ ID NO: 172869 - protein, 9 aa, Homo Sapiens
KGIADRLVL

SEQ ID NO: 172870 - protein, 9 aa, Homo Sapiens
KGIGEFFRL

SEQ ID NO: 172871 - protein, 9 aa, Homo Sapiens
KGPAVGIDL

SEQ ID NO: 172872 - protein, 9 aa, Homo Sapiens
KGPPAALTL

SEQ ID NO: 172873 - protein, 9 aa, Homo Sapiens
KGPYEYLTL

SEQ ID NO: 172874 - protein, 9 aa, Homo Sapiens
KHPKYCIEL

SEQ ID NO: 172875 - protein, 9 aa, Homo Sapiens
KIAGYVTHL

SEQ ID NO: 172876 - protein, 9 aa, Homo Sapiens
KIAKLGLKL

SEQ ID NO: 172877 - protein, 9 aa, Homo Sapiens
KIAKPLSSL

SEQ ID NO: 172878 - protein, 9 aa, Homo Sapiens
KIAPNTPQL

SEQ ID NO: 172879 - protein, 9 aa, Homo Sapiens
KIAPYSVEI

SEQ ID NO: 172880 - protein, 9 aa, Homo Sapiens
KIAQKALDL

SEQ ID NO: 172881 - protein, 9 aa, Homo Sapiens
KIDRLIVEL

SEQ ID NO: 172882 - protein, 9 aa, Homo Sapiens
KIFPAALQL

SEQ ID NO: 172883 - protein, 9 aa, Homo Sapiens
KIIAGSVAL

SEQ ID NO: 172884 - protein, 9 aa, Homo Sapiens
KIIAKGEEL

SEQ ID NO: 172885 - protein, 9 aa, Homo Sapiens
KIIDGLLVM

SEQ ID NO: 172886 - protein, 9 aa, Homo Sapiens
KIIEARLKM

SEQ ID NO: 172887 - protein, 9 aa, Homo Sapiens
KIIEMMPEF

SEQ ID NO: 172888 - protein, 9 aa, Homo Sapiens
KIIGDLLQF

SEQ ID NO: 172889 - protein, 9 aa, Homo Sapiens
KIIKDFYLL

SEQ ID NO: 172890 - protein, 9 aa, Homo Sapiens
KIIKEKQAF

SEQ ID NO: 172891 - protein, 9 aa, Homo Sapiens
KIIKETVRF

SEQ ID NO: 172892 - protein, 9 aa, Homo Sapiens
KIIKKPMDL

SEQ ID NO: 172893 - protein, 9 aa, Homo Sapiens
KIIKNPMDL

SEQ ID NO: 172894 - protein, 9 aa, Homo Sapiens
KIINFAPSL

SEQ ID NO: 172895 - protein, 9 aa, Homo Sapiens
KIINGYIFL

SEQ ID NO: 172896 - protein, 9 aa, Homo Sapiens
KIINQRLIL

SEQ ID NO: 172897 - protein, 9 aa, Homo Sapiens
KIIPLVVKF

SEQ ID NO: 172898 - protein, 9 aa, Homo Sapiens
KIIQLGLTF

SEQ ID NO: 172899 - protein, 9 aa, Homo Sapiens
KIITEGTKL

SEQ ID NO: 172900 - protein, 9 aa, Homo Sapiens
KIITRPMDL

SEQ ID NO: 172901 - protein, 9 aa, Homo Sapiens
KIIYKLIRL

SEQ ID NO: 172902 - protein, 9 aa, Homo Sapiens
KILAAILHL

SEQ ID NO: 172903 - protein, 9 aa, Homo Sapiens
KILAEAAKL

SEQ ID NO: 172904 - protein, 9 aa, Homo Sapiens
KILQERAVL

SEQ ID NO: 172905 - protein, 9 aa, Homo Sapiens
KINKKRIAL

SEQ ID NO: 172906 - protein, 9 aa, Homo Sapiens
KINSSAIKL

SEQ ID NO: 172907 - protein, 9 aa, Homo Sapiens
KIPAHRVVL

SEQ ID NO: 172908 - protein, 9 aa, Homo Sapiens
KIPALAVEM

SEQ ID NO: 172909 - protein, 9 aa, Homo Sapiens
KIPEYQQLL

SEQ ID NO: 172910 - protein, 9 aa, Homo Sapiens
KIPILGVHL

SEQ ID NO: 172911 - protein, 9 aa, Homo Sapiens
KIPKAYIRF

SEQ ID NO: 172912 - protein, 9 aa, Homo Sapiens
KIPKDEHIL

SEQ ID NO: 172913 - protein, 9 aa, Homo Sapiens
KIPKKNILL

SEQ ID NO: 172914 - protein, 9 aa, Homo Sapiens
KIPTAKPEL

SEQ ID NO: 172915 - protein, 9 aa, Homo Sapiens
KIPTCKITL

SEQ ID NO: 172916 - protein, 9 aa, Homo Sapiens
KISKEKSFL

SEQ ID NO: 172917 - protein, 9 aa, Homo Sapiens
KITAYVIIL

SEQ ID NO: 172918 - protein, 9 aa, Homo Sapiens
KITDEVLKL

SEQ ID NO: 172919 - protein, 9 aa, Homo Sapiens
KIVKETVRF

SEQ ID NO: 172920 - protein, 9 aa, Homo Sapiens
KIVKPGMKL

SEQ ID NO: 172921 - protein, 9 aa, Homo Sapiens
KIVQFIVTL

SEQ ID NO: 172922 - protein, 9 aa, Homo Sapiens
KIVSGKVRF

SEQ ID NO: 172923 - protein, 9 aa, Homo Sapiens
KKIPSPVKL

SEQ ID NO: 172924 - protein, 9 aa, Homo Sapiens
KKPEKPLIL

SEQ ID NO: 172925 - protein, 9 aa, Homo Sapiens
KKTKEAVLL

SEQ ID NO: 172926 - protein, 9 aa, Homo Sapiens
KLAPIPVEL

SEQ ID NO: 172927 - protein, 9 aa, Homo Sapiens
KLAPPLVTL

SEQ ID NO: 172928 - protein, 9 aa, Homo Sapiens
KLGISPLML

SEQ ID NO: 172929 - protein, 9 aa, Homo Sapiens
KLIAWKVCL

SEQ ID NO: 172930 - protein, 9 aa, Homo Sapiens
KLIEKNYFL

SEQ ID NO: 172931 - protein, 9 aa, Homo Sapiens
KLIFPYVEL

SEQ ID NO: 172932 - protein, 9 aa, Homo Sapiens
KLIHEKHLL

SEQ ID NO: 172933 - protein, 9 aa, Homo Sapiens
KLIIWKIAL

SEQ ID NO: 172934 - protein, 9 aa, Homo Sapiens
KLIKDGLII

SEQ ID NO: 172935 - protein, 9 aa, Homo Sapiens
KLIKTSPEL

SEQ ID NO: 172936 - protein, 9 aa, Homo Sapiens
KLILKGVIL

SEQ ID NO: 172937 - protein, 9 aa, Homo Sapiens
KLIPNAIQI

SEQ ID NO: 172938 - protein, 9 aa, Homo Sapiens
KLIQQRAVL

SEQ ID NO: 172939 - protein, 9 aa, Homo Sapiens
KLITSFLEL

SEQ ID NO: 172940 - protein, 9 aa, Homo Sapiens
KLLKEAVVL

SEQ ID NO: 172941 - protein, 9 aa, Homo Sapiens
KLLRDRIVL

SEQ ID NO: 172942 - protein, 9 aa, Homo Sapiens
KLLSEALEL

SEQ ID NO: 172943 - protein, 9 aa, Homo Sapiens
KLPAIALDL

SEQ ID NO: 172944 - protein, 9 aa, Homo Sapiens
KLPAPLPGL

SEQ ID NO: 172945 - protein, 9 aa, Homo Sapiens
KLPDCSLRL

SEQ ID NO: 172946 - protein, 9 aa, Homo Sapiens
KLPDKTVEF

SEQ ID NO: 172947 - protein, 9 aa, Homo Sapiens
KLPELWALL

SEQ ID NO: 172948 - protein, 9 aa, Homo Sapiens
KLPGIALEL

SEQ ID NO: 172949 - protein, 9 aa, Homo Sapiens
KLPKDTALL

SEQ ID NO: 172950 - protein, 9 aa, Homo Sapiens
KLPKEREEL

SEQ ID NO: 172951 - protein, 9 aa, Homo Sapiens
KLPKGTVSF

SEQ ID NO: 172952 - protein, 9 aa, Homo Sapiens
KLPLMKINF

SEQ ID NO: 172953 - protein, 9 aa, Homo Sapiens
KLPPKRPEL

SEQ ID NO: 172954 - protein, 9 aa, Homo Sapiens
KLPPLPLTL

SEQ ID NO: 172955 - protein, 9 aa, Homo Sapiens
KLPQFCAHL

SEQ ID NO: 172956 - protein, 9 aa, Homo Sapiens
KLPQQREKL

SEQ ID NO: 172957 - protein, 9 aa, Homo Sapiens
KLPQRTAKL

SEQ ID NO: 172958 - protein, 9 aa, Homo Sapiens
KLPSVPTKL

SEQ ID NO: 172959 - protein, 9 aa, Homo Sapiens
KLPYELIQL

SEQ ID NO: 172960 - protein, 9 aa, Homo Sapiens
KLSVTKPVL

SEQ ID NO: 172961 - protein, 9 aa, Homo Sapiens
KLTRDAIEL

SEQ ID NO: 172962 - protein, 9 aa, Homo Sapiens
KLVFDKVGL

SEQ ID NO: 172963 - protein, 9 aa, Homo Sapiens
KLVKKKWNL

SEQ ID NO: 172964 - protein, 9 aa, Homo Sapiens
KLVRDAFAL

SEQ ID NO: 172965 - protein, 9 aa, Homo Sapiens
KLVRKLIRL

SEQ ID NO: 172966 - protein, 9 aa, Homo Sapiens
KLVTEPLVL

SEQ ID NO: 172967 - protein, 9 aa, Homo Sapiens
KMAGRAVLL

SEQ ID NO: 172968 - protein, 9 aa, Homo Sapiens
KMIGLKAKL

SEQ ID NO: 172969 - protein, 9 aa, Homo Sapiens
KMPACNIML

SEQ ID NO: 172970 - protein, 9 aa, Homo Sapiens
KMPDMHVNM

SEQ ID NO: 172971 - protein, 9 aa, Homo Sapiens
KMVRQILEL

SEQ ID NO: 172972 - protein, 9 aa, Homo Sapiens
KNILTLIEL

SEQ ID NO: 172973 - protein, 9 aa, Homo Sapiens
KNIPMTLEL

SEQ ID NO: 172974 - protein, 9 aa, Homo Sapiens
KNPAFKPVL

SEQ ID NO: 172975 - protein, 9 aa, Homo Sapiens
KNPQKFTIL

SEQ ID NO: 172976 - protein, 9 aa, Homo Sapiens
KNTLNKVVL

SEQ ID NO: 172977 - protein, 9 aa, Homo Sapiens
KNVTEHLKL

SEQ ID NO: 172978 - protein, 9 aa, Homo Sapiens
KQALDKLKL

SEQ ID NO: 172979 - protein, 9 aa, Homo Sapiens
KQAQEKFEL

SEQ ID NO: 172980 - protein, 9 aa, Homo Sapiens
KQIGEHLLL

SEQ ID NO: 172981 - protein, 9 aa, Homo Sapiens
KQPAEHLQL

SEQ ID NO: 172982 - protein, 9 aa, Homo Sapiens
KQPEEGLRL

SEQ ID NO: 172983 - protein, 9 aa, Homo Sapiens
KQPEEYHYL

SEQ ID NO: 172984 - protein, 9 aa, Homo Sapiens
KQPPPSIRL

SEQ ID NO: 172985 - protein, 9 aa, Homo Sapiens
KQPRQDYQL

SEQ ID NO: 172986 - protein, 9 aa, Homo Sapiens
KRIRDAIRM

SEQ ID NO: 172987 - protein, 9 aa, Homo Sapiens
KRPAGPLVL

SEQ ID NO: 172988 - protein, 9 aa, Homo Sapiens
KRPALPVQL

SEQ ID NO: 172989 - protein, 9 aa, Homo Sapiens
KRPELGVTL

SEQ ID NO: 172990 - protein, 9 aa, Homo Sapiens
KRPFGVSLL

SEQ ID NO: 172991 - protein, 9 aa, Homo Sapiens
KRPNAILKL

SEQ ID NO: 172992 - protein, 9 aa, Homo Sapiens
KRPTAEICL

SEQ ID NO: 172993 - protein, 9 aa, Homo Sapiens
KRPVGGFLL

SEQ ID NO: 172994 - protein, 9 aa, Homo Sapiens
KRPYPFVLF

SEQ ID NO: 172995 - protein, 9 aa, Homo Sapiens
KRVEGALNL

SEQ ID NO: 172996 - protein, 9 aa, Homo Sapiens
KSIKNVTEL

SEQ ID NO: 172997 - protein, 9 aa, Homo Sapiens
KSPAIFGVL

SEQ ID NO: 172998 - protein, 9 aa, Homo Sapiens
KSPAITATL

SEQ ID NO: 172999 - protein, 9 aa, Homo Sapiens
KSPASTFAL

SEQ ID NO: 173000 - protein, 9 aa, Homo Sapiens
KSPERFLQL

SEQ ID NO: 173001 - protein, 9 aa, Homo Sapiens
KSPGFGLSL

SEQ ID NO: 173002 - protein, 9 aa, Homo Sapiens
KSPGHMVIL

SEQ ID NO: 173003 - protein, 9 aa, Homo Sapiens
KSPGTANVL

SEQ ID NO: 173004 - protein, 9 aa, Homo Sapiens
KSPNQSLRL

SEQ ID NO: 173005 - protein, 9 aa, Homo Sapiens
KSPQKSTVL

SEQ ID NO: 173006 - protein, 9 aa, Homo Sapiens
KSPSSKPSL

SEQ ID NO: 173007 - protein, 9 aa, Homo Sapiens
KSPVQVILL

SEQ ID NO: 173008 - protein, 9 aa, Homo Sapiens
KSSVKAVIL

SEQ ID NO: 173009 - protein, 9 aa, Homo Sapiens
KSVDDGITL

SEQ ID NO: 173010 - protein, 9 aa, Homo Sapiens
KSVEEKLSL

SEQ ID NO: 173011 - protein, 9 aa, Homo Sapiens
KSVENFVNL

SEQ ID NO: 173012 - protein, 9 aa, Homo Sapiens
KSVKVKIKL

SEQ ID NO: 173013 - protein, 9 aa, Homo Sapiens
KSVVLYVIL

SEQ ID NO: 173014 - protein, 9 aa, Homo Sapiens
KTADKKLLL

SEQ ID NO: 173015 - protein, 9 aa, Homo Sapiens
KTIDGHINL

SEQ ID NO: 173016 - protein, 9 aa, Homo Sapiens
KTIHKYVHL

SEQ ID NO: 173017 - protein, 9 aa, Homo Sapiens
KTILDKVKL

SEQ ID NO: 173018 - protein, 9 aa, Homo Sapiens
KTILDPLTL

SEQ ID NO: 173019 - protein, 9 aa, Homo Sapiens
KTPDSRPSL

SEQ ID NO: 173020 - protein, 9 aa, Homo Sapiens
KTPERYLKI

SEQ ID NO: 173021 - protein, 9 aa, Homo Sapiens
KTPESNIKM

SEQ ID NO: 173022 - protein, 9 aa, Homo Sapiens
KTPLKKFLL

SEQ ID NO: 173023 - protein, 9 aa, Homo Sapiens
KTPMENIGL

SEQ ID NO: 173024 - protein, 9 aa, Homo Sapiens
KTPNFSTLL

SEQ ID NO: 173025 - protein, 9 aa, Homo Sapiens
KTPQYKASL

SEQ ID NO: 173026 - protein, 9 aa, Homo Sapiens
KTPVKFWLL

SEQ ID NO: 173027 - protein, 9 aa, Homo Sapiens
KTSTQKFFL

SEQ ID NO: 173028 - protein, 9 aa, Homo Sapiens
KTVDQHMKL

SEQ ID NO: 173029 - protein, 9 aa, Homo Sapiens
KTVEQHLRL

SEQ ID NO: 173030 - protein, 9 aa, Homo Sapiens
KTVIGKARL

SEQ ID NO: 173031 - protein, 9 aa, Homo Sapiens
KTVNERITL

SEQ ID NO: 173032 - protein, 9 aa, Homo Sapiens
KTVQCKVTL

SEQ ID NO: 173033 - protein, 9 aa, Homo Sapiens
KVIDRKVEL

SEQ ID NO: 173034 - protein, 9 aa, Homo Sapiens
KVIEEAVYF

SEQ ID NO: 173035 - protein, 9 aa, Homo Sapiens
KVIEKRYFL

SEQ ID NO: 173036 - protein, 9 aa, Homo Sapiens
KVIKEAAIL

SEQ ID NO: 173037 - protein, 9 aa, Homo Sapiens
KVISSNTSL

SEQ ID NO: 173038 - protein, 9 aa, Homo Sapiens
KVPAESPTL

SEQ ID NO: 173039 - protein, 9 aa, Homo Sapiens
KVPEKKLKL

SEQ ID NO: 173040 - protein, 9 aa, Homo Sapiens
KVPHDPVAL

SEQ ID NO: 173041 - protein, 9 aa, Homo Sapiens
KVPKERLAL

SEQ ID NO: 173042 - protein, 9 aa, Homo Sapiens
KVPLQYNEL

SEQ ID NO: 173043 - protein, 9 aa, Homo Sapiens
KVPNQYTHL

SEQ ID NO: 173044 - protein, 9 aa, Homo Sapiens
KVPQRALEL

SEQ ID NO: 173045 - protein, 9 aa, Homo Sapiens
KVPVHVIRM

SEQ ID NO: 173046 - protein, 9 aa, Homo Sapiens
KVVITRLKL

SEQ ID NO: 173047 - protein, 9 aa, Homo Sapiens
KVVSQYHEL

SEQ ID NO: 173048 - protein, 9 aa, Homo Sapiens
KVVVHPLVL

SEQ ID NO: 173049 - protein, 9 aa, Homo Sapiens
KWPETPLLL

SEQ ID NO: 173050 - protein, 9 aa, Homo Sapiens
KYIHSANVL

SEQ ID NO: 173051 - protein, 9 aa, Homo Sapiens
KYPDNQVKL

SEQ ID NO: 173052 - protein, 9 aa, Homo Sapiens
KYPENFFLL

SEQ ID NO: 173053 - protein, 9 aa, Homo Sapiens
KYPFIPLLL

SEQ ID NO: 173054 - protein, 9 aa, Homo Sapiens
KYPHYFPLL

SEQ ID NO: 173055 - protein, 9 aa, Homo Sapiens
KYPHYFPVM

SEQ ID NO: 173056 - protein, 9 aa, Homo Sapiens
KYPQAIYTL

SEQ ID NO: 173057 - protein, 9 aa, Homo Sapiens
KYPVHIYRL

SEQ ID NO: 173058 - protein, 9 aa, Homo Sapiens
KYPYVAVML

SEQ ID NO: 173059 - protein, 9 aa, Homo Sapiens
KYVIGTLEL

SEQ ID NO: 173060 - protein, 9 aa, Homo Sapiens
LFPPEPLVL

SEQ ID NO: 173061 - protein, 9 aa, Homo Sapiens
LIIGKKFKL

SEQ ID NO: 173062 - protein, 9 aa, Homo Sapiens
LIVDRPVTL

SEQ ID NO: 173063 - protein, 9 aa, Homo Sapiens
LLPNGKLIL

SEQ ID NO: 173064 - protein, 9 aa, Homo Sapiens
LLVKNKITL

SEQ ID NO: 173065 - protein, 9 aa, Homo Sapiens
LQPATPVTL

SEQ ID NO: 173066 - protein, 9 aa, Homo Sapiens
LRRPLLHEL

SEQ ID NO: 173067 - protein, 9 aa, Homo Sapiens
LRVKDSLLR

SEQ ID NO: 173068 - protein, 9 aa, Homo Sapiens
LSPHKYYFL

SEQ ID NO: 173069 - protein, 9 aa, Homo Sapiens
LSPKEFYEL

SEQ ID NO: 173070 - protein, 9 aa, Homo Sapiens
LSPKSYYEL

SEQ ID NO: 173071 - protein, 9 aa, Homo Sapiens
LTPKFYVAL

SEQ ID NO: 173072 - protein, 9 aa, Homo Sapiens
LVIKGKIEL

SEQ ID NO: 173073 - protein, 9 aa, Homo Sapiens
MAPRTLFLL

SEQ ID NO: 173074 - protein, 9 aa, Homo Sapiens
MFPEMSIHL

SEQ ID NO: 173075 - protein, 9 aa, Homo Sapiens
MLPGLALLL

SEQ ID NO: 173076 - protein, 9 aa, Homo Sapiens
MLPPKKFVL

SEQ ID NO: 173077 - protein, 9 aa, Homo Sapiens
MLPSEPVLL

SEQ ID NO: 173078 - protein, 9 aa, Homo Sapiens
MQIVHKITL

SEQ ID NO: 173079 - protein, 9 aa, Homo Sapiens
MQPTHPIRL

SEQ ID NO: 173080 - protein, 9 aa, Homo Sapiens
MRPRKAFLL

SEQ ID NO: 173081 - protein, 9 aa, Homo Sapiens
MSPNSYIKL

SEQ ID NO: 173082 - protein, 9 aa, Homo Sapiens
NIIAKKIVL

SEQ ID NO: 173083 - protein, 9 aa, Homo Sapiens
NIPAGKPSL

SEQ ID NO: 173084 - protein, 9 aa, Homo Sapiens
NIPPNKIIL

SEQ ID NO: 173085 - protein, 9 aa, Homo Sapiens
NIVANTVLL

SEQ ID NO: 173086 - protein, 9 aa, Homo Sapiens
PLAPAPVFI

SEQ ID NO: 173087 - protein, 9 aa, Homo Sapiens
QAPKDSFAL

SEQ ID NO: 173088 - protein, 9 aa, Homo Sapiens
QFPAEPLEL

SEQ ID NO: 173089 - protein, 9 aa, Homo Sapiens
QFPGGSIDL

SEQ ID NO: 173090 - protein, 9 aa, Homo Sapiens
QFVKDSIRL

SEQ ID NO: 173091 - protein, 9 aa, Homo Sapiens
QIPENGLTL

SEQ ID NO: 173092 - protein, 9 aa, Homo Sapiens
QIVKEKVHL

SEQ ID NO: 173093 - protein, 9 aa, Homo Sapiens
QLIAKKIKL

SEQ ID NO: 173094 - protein, 9 aa, Homo Sapiens
QLIEKRLNL

SEQ ID NO: 173095 - protein, 9 aa, Homo Sapiens
QLPYNGVVL

SEQ ID NO: 173096 - protein, 9 aa, Homo Sapiens
QMPKVHIEF

SEQ ID NO: 173097 - protein, 9 aa, Homo Sapiens
QVIKEKLRL

SEQ ID NO: 173098 - protein, 9 aa, Homo Sapiens
RAIQKKIDL

SEQ ID NO: 173099 - protein, 9 aa, Homo Sapiens
RAPAQNPEL

SEQ ID NO: 173100 - protein, 9 aa, Homo Sapiens
RAPPPPPLL

SEQ ID NO: 173101 - protein, 9 aa, Homo Sapiens
RAVLEKLKL

SEQ ID NO: 173102 - protein, 9 aa, Homo Sapiens
RCIKETLRL

SEQ ID NO: 173103 - protein, 9 aa, Homo Sapiens
RCIQEFISL

SEQ ID NO: 173104 - protein, 9 aa, Homo Sapiens
RFPDENFKL

SEQ ID NO: 173105 - protein, 9 aa, Homo Sapiens
RFPDENFTL

SEQ ID NO: 173106 - protein, 9 aa, Homo Sapiens
RFPDLTVEL

SEQ ID NO: 173107 - protein, 9 aa, Homo Sapiens
RFPFSRPEL

SEQ ID NO: 173108 - protein, 9 aa, Homo Sapiens
RFPHDKLLL

SEQ ID NO: 173109 - protein, 9 aa, Homo Sapiens
RFPHHDNEL

SEQ ID NO: 173110 - protein, 9 aa, Homo Sapiens
RFPKAPSKL

SEQ ID NO: 173111 - protein, 9 aa, Homo Sapiens
RFPSTAIKI

SEQ ID NO: 173112 - protein, 9 aa, Homo Sapiens
RFPTQHQRL

SEQ ID NO: 173113 - protein, 9 aa, Homo Sapiens
RGISEFIVM

SEQ ID NO: 173114 - protein, 9 aa, Homo Sapiens
RGPAHKLAL

SEQ ID NO: 173115 - protein, 9 aa, Homo Sapiens
RGPLAKIWL

SEQ ID NO: 173116 - protein, 9 aa, Homo Sapiens
RGPLKCVKL

SEQ ID NO: 173117 - protein, 9 aa, Homo Sapiens
RGPPARVTL

SEQ ID NO: 173118 - protein, 9 aa, Homo Sapiens
RGPPKGILL

SEQ ID NO: 173119 - protein, 9 aa, Homo Sapiens
RGPPQRPKL

SEQ ID NO: 173120 - protein, 9 aa, Homo Sapiens
RGPSHPLDL

SEQ ID NO: 173121 - protein, 9 aa, Homo Sapiens
RGVDNKIRL

SEQ ID NO: 173122 - protein, 9 aa, Homo Sapiens
RHPASSVAL

SEQ ID NO: 173123 - protein, 9 aa, Homo Sapiens
RHPKYKTEL

SEQ ID NO: 173124 - protein, 9 aa, Homo Sapiens
RHPQRNFIL

SEQ ID NO: 173125 - protein, 9 aa, Homo Sapiens
RHPREVVIL

SEQ ID NO: 173126 - protein, 9 aa, Homo Sapiens
RHPSQTVEL

SEQ ID NO: 173127 - protein, 9 aa, Homo Sapiens
RHPSTNSLL

SEQ ID NO: 173128 - protein, 9 aa, Homo Sapiens
RIAEFTTNL

SEQ ID NO: 173129 - protein, 9 aa, Homo Sapiens
RIAEYAFKL

SEQ ID NO: 173130 - protein, 9 aa, Homo Sapiens
RIAIEKIRL

SEQ ID NO: 173131 - protein, 9 aa, Homo Sapiens
RIAKESINF

SEQ ID NO: 173132 - protein, 9 aa, Homo Sapiens
RIAPRPYRL

SEQ ID NO: 173133 - protein, 9 aa, Homo Sapiens
RIAQLRFLL

SEQ ID NO: 173134 - protein, 9 aa, Homo Sapiens
RIIDCAFTV

SEQ ID NO: 173135 - protein, 9 aa, Homo Sapiens
RIIHDSLQL

SEQ ID NO: 173136 - protein, 9 aa, Homo Sapiens
RIIKETQRL

SEQ ID NO: 173137 - protein, 9 aa, Homo Sapiens
RIIPRHLQL

SEQ ID NO: 173138 - protein, 9 aa, Homo Sapiens
RIIPYLLRL

SEQ ID NO: 173139 - protein, 9 aa, Homo Sapiens
RIIQDRVSL

SEQ ID NO: 173140 - protein, 9 aa, Homo Sapiens
RIIRKVVKL

SEQ ID NO: 173141 - protein, 9 aa, Homo Sapiens
RIISGHIDL

SEQ ID NO: 173142 - protein, 9 aa, Homo Sapiens
RILASPVEL

SEQ ID NO: 173143 - protein, 9 aa, Homo Sapiens
RIPAEVLIL

SEQ ID NO: 173144 - protein, 9 aa, Homo Sapiens
RIPAHRLVL

SEQ ID NO: 173145 - protein, 9 aa, Homo Sapiens
RIPATPVVI

SEQ ID NO: 173146 - protein, 9 aa, Homo Sapiens
RIPAVRTVL

SEQ ID NO: 173147 - protein, 9 aa, Homo Sapiens
RIPAYFVTV

SEQ ID NO: 173148 - protein, 9 aa, Homo Sapiens
RIPKEQGVL

SEQ ID NO: 173149 - protein, 9 aa, Homo Sapiens
RIPNRGIDL

SEQ ID NO: 173150 - protein, 9 aa, Homo Sapiens
RIPPIAARL

SEQ ID NO: 173151 - protein, 9 aa, Homo Sapiens
RIPPSYVKM

SEQ ID NO: 173152 - protein, 9 aa, Homo Sapiens
RIPPVAVRL

SEQ ID NO: 173153 - protein, 9 aa, Homo Sapiens
RIPRVFSWL

SEQ ID NO: 173154 - protein, 9 aa, Homo Sapiens
RIPSFVTEL

SEQ ID NO: 173155 - protein, 9 aa, Homo Sapiens
RIPTISTQL

SEQ ID NO: 173156 - protein, 9 aa, Homo Sapiens
RISELRLIL

SEQ ID NO: 173157 - protein, 9 aa, Homo Sapiens
RISLNTLTL

SEQ ID NO: 173158 - protein, 9 aa, Homo Sapiens
RISNPPILL

SEQ ID NO: 173159 - protein, 9 aa, Homo Sapiens
RISVLPAYL

SEQ ID NO: 173160 - protein, 9 aa, Homo Sapiens
RITDKGLEL

SEQ ID NO: 173161 - protein, 9 aa, Homo Sapiens
RITPRHLQL

SEQ ID NO: 173162 - protein, 9 aa, Homo Sapiens
RIVAHAVEV

SEQ ID NO: 173163 - protein, 9 aa, Homo Sapiens
RIVDVRPTL

SEQ ID NO: 173164 - protein, 9 aa, Homo Sapiens
RIVLHSLDL

SEQ ID NO: 173165 - protein, 9 aa, Homo Sapiens
RIVPEPVQF

SEQ ID NO: 173166 - protein, 9 aa, Homo Sapiens
RIVQATTLL

SEQ ID NO: 173167 - protein, 9 aa, Homo Sapiens
RIVSQLLTL

SEQ ID NO: 173168 - protein, 9 aa, Homo Sapiens
RIVTGNFIL

SEQ ID NO: 173169 - protein, 9 aa, Homo Sapiens
RIVVEHIIM

SEQ ID NO: 173170 - protein, 9 aa, Homo Sapiens
RIYPHGLVL

SEQ ID NO: 173171 - protein, 9 aa, Homo Sapiens
RKIKGVIEL

SEQ ID NO: 173172 - protein, 9 aa, Homo Sapiens
RKPDSKIVL

SEQ ID NO: 173173 - protein, 9 aa, Homo Sapiens
RKPPTSIRL

SEQ ID NO: 173174 - protein, 9 aa, Homo Sapiens
RLAQEAVTL

SEQ ID NO: 173175 - protein, 9 aa, Homo Sapiens
RLHLPPVRL

SEQ ID NO: 173176 - protein, 9 aa, Homo Sapiens
RLIAQRYLL

SEQ ID NO: 173177 - protein, 9 aa, Homo Sapiens
RLIERKSDL

SEQ ID NO: 173178 - protein, 9 aa, Homo Sapiens
RLINQVLEL

SEQ ID NO: 173179 - protein, 9 aa, Homo Sapiens
RLIPNAIQV

SEQ ID NO: 173180 - protein, 9 aa, Homo Sapiens
RLIQEAAVL

SEQ ID NO: 173181 - protein, 9 aa, Homo Sapiens
RLLKSKLYL

SEQ ID NO: 173182 - protein, 9 aa, Homo Sapiens
RLLLLPLLL

SEQ ID NO: 173183 - protein, 9 aa, Homo Sapiens
RLPAWQPIL

SEQ ID NO: 173184 - protein, 9 aa, Homo Sapiens
RLPDEKVEL

SEQ ID NO: 173185 - protein, 9 aa, Homo Sapiens
RLPDGRVVL

SEQ ID NO: 173186 - protein, 9 aa, Homo Sapiens
RLPDQFSKL

SEQ ID NO: 173187 - protein, 9 aa, Homo Sapiens
RLPDVQLWL

SEQ ID NO: 173188 - protein, 9 aa, Homo Sapiens
RLPEIYIQL

SEQ ID NO: 173189 - protein, 9 aa, Homo Sapiens
RLPFKRLNL

SEQ ID NO: 173190 - protein, 9 aa, Homo Sapiens
RLPGDCFLL

SEQ ID NO: 173191 - protein, 9 aa, Homo Sapiens
RLPHHSAIL

SEQ ID NO: 173192 - protein, 9 aa, Homo Sapiens
RLPKDFVDL

SEQ ID NO: 173193 - protein, 9 aa, Homo Sapiens
RLPLISVAL

SEQ ID NO: 173194 - protein, 9 aa, Homo Sapiens
RLPPATLTL

SEQ ID NO: 173195 - protein, 9 aa, Homo Sapiens
RLPPPFPGL

SEQ ID NO: 173196 - protein, 9 aa, Homo Sapiens
RLPPTPLLL

SEQ ID NO: 173197 - protein, 9 aa, Homo Sapiens
RLPPYSSQL

SEQ ID NO: 173198 - protein, 9 aa, Homo Sapiens
RLPQYQTDL

SEQ ID NO: 173199 - protein, 9 aa, Homo Sapiens
RLPQYYIVV

SEQ ID NO: 173200 - protein, 9 aa, Homo Sapiens
RLPSGKVGF

SEQ ID NO: 173201 - protein, 9 aa, Homo Sapiens
RLPSVALLL

SEQ ID NO: 173202 - protein, 9 aa, Homo Sapiens
RLPTVLLKL

SEQ ID NO: 173203 - protein, 9 aa, Homo Sapiens
RLPVEKIEI

SEQ ID NO: 173204 - protein, 9 aa, Homo Sapiens
RLVADKLIF

SEQ ID NO: 173205 - protein, 9 aa, Homo Sapiens
RLVESKVEL

SEQ ID NO: 173206 - protein, 9 aa, Homo Sapiens
RLVHVAVEM

SEQ ID NO: 173207 - protein, 9 aa, Homo Sapiens
RLVINRLKL

SEQ ID NO: 173208 - protein, 9 aa, Homo Sapiens
RLVKEYTVL

SEQ ID NO: 173209 - protein, 9 aa, Homo Sapiens
RLVKVKVLL

SEQ ID NO: 173210 - protein, 9 aa, Homo Sapiens
RLVLDSVKL

SEQ ID NO: 173211 - protein, 9 aa, Homo Sapiens
RLVPFLVEL

SEQ ID NO: 173212 - protein, 9 aa, Homo Sapiens
RMIKPRIVL

SEQ ID NO: 173213 - protein, 9 aa, Homo Sapiens
RMPAEIVVL

SEQ ID NO: 173214 - protein, 9 aa, Homo Sapiens
RMPCHKPYL

SEQ ID NO: 173215 - protein, 9 aa, Homo Sapiens
RMPDGPVAL

SEQ ID NO: 173216 - protein, 9 aa, Homo Sapiens
RMPPRSVLL

SEQ ID NO: 173217 - protein, 9 aa, Homo Sapiens
RMPRCGIRL

SEQ ID NO: 173218 - protein, 9 aa, Homo Sapiens
RMPRWAERL

SEQ ID NO: 173219 - protein, 9 aa, Homo Sapiens
RMVASKMEL

SEQ ID NO: 173220 - protein, 9 aa, Homo Sapiens
RNIPETLEL

SEQ ID NO: 173221 - protein, 9 aa, Homo Sapiens
RNIVKKFLM

SEQ ID NO: 173222 - protein, 9 aa, Homo Sapiens
RNPKNYLSL

SEQ ID NO: 173223 - protein, 9 aa, Homo Sapiens
RNPQSYLYL

SEQ ID NO: 173224 - protein, 9 aa, Homo Sapiens
RPRGLGPLR

SEQ ID NO: 173225 - protein, 9 aa, Homo Sapiens
RQIPWKLGL

SEQ ID NO: 173226 - protein, 9 aa, Homo Sapiens
RQPEFRAVL

SEQ ID NO: 173227 - protein, 9 aa, Homo Sapiens
RQPGHTIYL

SEQ ID NO: 173228 - protein, 9 aa, Homo Sapiens
RQPIQMIVL

SEQ ID NO: 173229 - protein, 9 aa, Homo Sapiens
RQPNPPLIL

SEQ ID NO: 173230 - protein, 9 aa, Homo Sapiens
RQPPESLKL

SEQ ID NO: 173231 - protein, 9 aa, Homo Sapiens
RQPSLFYHL

SEQ ID NO: 173232 - protein, 9 aa, Homo Sapiens
RQPVDAVKL

SEQ ID NO: 173233 - protein, 9 aa, Homo Sapiens
RQPYAVSEL

SEQ ID NO: 173234 - protein, 9 aa, Homo Sapiens
RQPYSRFLL

SEQ ID NO: 173235 - protein, 9 aa, Homo Sapiens
RQVASHVGL

SEQ ID NO: 173236 - protein, 9 aa, Homo Sapiens
RQVDSHVEL

SEQ ID NO: 173237 - protein, 9 aa, Homo Sapiens
RRPLFALLL

SEQ ID NO: 173238 - protein, 9 aa, Homo Sapiens
RRPLHTVVL

SEQ ID NO: 173239 - protein, 9 aa, Homo Sapiens
RRPNCGIRL

SEQ ID NO: 173240 - protein, 9 aa, Homo Sapiens
RRPYKPIAL

SEQ ID NO: 173241 - protein, 9 aa, Homo Sapiens
RRPYVRVEL

SEQ ID NO: 173242 - protein, 9 aa, Homo Sapiens
RRVEEALVL

SEQ ID NO: 173243 - protein, 9 aa, Homo Sapiens
RSIFDHIKL

SEQ ID NO: 173244 - protein, 9 aa, Homo Sapiens
RSPAGSPEL

SEQ ID NO: 173245 - protein, 9 aa, Homo Sapiens
RSPALQILL

SEQ ID NO: 173246 - protein, 9 aa, Homo Sapiens
RSPDRNLLL

SEQ ID NO: 173247 - protein, 9 aa, Homo Sapiens
RSPEEVTEL

SEQ ID NO: 173248 - protein, 9 aa, Homo Sapiens
RSPFSFVYL

SEQ ID NO: 173249 - protein, 9 aa, Homo Sapiens
RSPGRAYAL

SEQ ID NO: 173250 - protein, 9 aa, Homo Sapiens
RSPKLFVVF

SEQ ID NO: 173251 - protein, 9 aa, Homo Sapiens
RSPMHRVTL

SEQ ID NO: 173252 - protein, 9 aa, Homo Sapiens
RSPPIKPLL

SEQ ID NO: 173253 - protein, 9 aa, Homo Sapiens
RSPPRALVL

SEQ ID NO: 173254 - protein, 9 aa, Homo Sapiens
RSPRTLVTL

SEQ ID NO: 173255 - protein, 9 aa, Homo Sapiens
RSPSKNIYL

SEQ ID NO: 173256 - protein, 9 aa, Homo Sapiens
RSPTAWHRL

SEQ ID NO: 173257 - protein, 9 aa, Homo Sapiens
RSPTKAPHL

SEQ ID NO: 173258 - protein, 9 aa, Homo Sapiens
RSPVTKIML

SEQ ID NO: 173259 - protein, 9 aa, Homo Sapiens
RSPVYLTVL

SEQ ID NO: 173260 - protein, 9 aa, Homo Sapiens
RSVKVKIKL

SEQ ID NO: 173261 - protein, 9 aa, Homo Sapiens
RTAKGKPVL

SEQ ID NO: 173262 - protein, 9 aa, Homo Sapiens
RTIAKRLVL

SEQ ID NO: 173263 - protein, 9 aa, Homo Sapiens
RTIARTIVL

SEQ ID NO: 173264 - protein, 9 aa, Homo Sapiens
RTPPEAIAL

SEQ ID NO: 173265 - protein, 9 aa, Homo Sapiens
RTPSGKLRL

SEQ ID NO: 173266 - protein, 9 aa, Homo Sapiens
RTPYHVNLL

SEQ ID NO: 173267 - protein, 9 aa, Homo Sapiens
RTVDARLKL

SEQ ID NO: 173268 - protein, 9 aa, Homo Sapiens
RTVRQHLNL

SEQ ID NO: 173269 - protein, 9 aa, Homo Sapiens
RVAIKKIVL

SEQ ID NO: 173270 - protein, 9 aa, Homo Sapiens
RVIDYILDL

SEQ ID NO: 173271 - protein, 9 aa, Homo Sapiens
RVIGPPVVL

SEQ ID NO: 173272 - protein, 9 aa, Homo Sapiens
RVIKNSIRL

SEQ ID NO: 173273 - protein, 9 aa, Homo Sapiens
RVPAHAVVV

SEQ ID NO: 173274 - protein, 9 aa, Homo Sapiens
RVPAHRNLL

SEQ ID NO: 173275 - protein, 9 aa, Homo Sapiens
RVPATNLIL

SEQ ID NO: 173276 - protein, 9 aa, Homo Sapiens
RVPKDRPSL

SEQ ID NO: 173277 - protein, 9 aa, Homo Sapiens
RVPKSKLEV

SEQ ID NO: 173278 - protein, 9 aa, Homo Sapiens
RVPKWIIAL

SEQ ID NO: 173279 - protein, 9 aa, Homo Sapiens
RVPMEVVLL

SEQ ID NO: 173280 - protein, 9 aa, Homo Sapiens
RVPNISVHL

SEQ ID NO: 173281 - protein, 9 aa, Homo Sapiens
RVPNSVLWL

SEQ ID NO: 173282 - protein, 9 aa, Homo Sapiens
RVPNVRVLL

SEQ ID NO: 173283 - protein, 9 aa, Homo Sapiens
RVPQEAVKL

SEQ ID NO: 173284 - protein, 9 aa, Homo Sapiens
RVPSALVTL

SEQ ID NO: 173285 - protein, 9 aa, Homo Sapiens
RVPTASYDL

SEQ ID NO: 173286 - protein, 9 aa, Homo Sapiens
RVSKKNIFL

SEQ ID NO: 173287 - protein, 9 aa, Homo Sapiens
RVTRSTLVL

SEQ ID NO: 173288 - protein, 9 aa, Homo Sapiens
RVVAQVLTL

SEQ ID NO: 173289 - protein, 9 aa, Homo Sapiens
RVVDNPIYL

SEQ ID NO: 173290 - protein, 9 aa, Homo Sapiens
RVVDQPLKL

SEQ ID NO: 173291 - protein, 9 aa, Homo Sapiens
RVVLKRVLL

SEQ ID NO: 173292 - protein, 9 aa, Homo Sapiens
RYIANTVEL

SEQ ID NO: 173293 - protein, 9 aa, Homo Sapiens
RYPCFFNTL

SEQ ID NO: 173294 - protein, 9 aa, Homo Sapiens
RYPDPLIKV

SEQ ID NO: 173295 - protein, 9 aa, Homo Sapiens
RYPEETLSL

SEQ ID NO: 173296 - protein, 9 aa, Homo Sapiens
RYPPAANEL

SEQ ID NO: 173297 - protein, 9 aa, Homo Sapiens
RYPPDSVRL

SEQ ID NO: 173298 - protein, 9 aa, Homo Sapiens
RYPRESNKL

SEQ ID NO: 173299 - protein, 9 aa, Homo Sapiens
RYPTSIASL

SEQ ID NO: 173300 - protein, 9 aa, Homo Sapiens
RYPTTFVMV

SEQ ID NO: 173301 - protein, 9 aa, Homo Sapiens
SAPAKKIKL

SEQ ID NO: 173302 - protein, 9 aa, Homo Sapiens
SFPCHQTKL

SEQ ID NO: 173303 - protein, 9 aa, Homo Sapiens
SFPIYKVLF

SEQ ID NO: 173304 - protein, 9 aa, Homo Sapiens
SFPLVTVHL

SEQ ID NO: 173305 - protein, 9 aa, Homo Sapiens
SFPSEPVKL

SEQ ID NO: 173306 - protein, 9 aa, Homo Sapiens
SFPTQPVNL

SEQ ID NO: 173307 - protein, 9 aa, Homo Sapiens
SIIADRIAL

SEQ ID NO: 173308 - protein, 9 aa, Homo Sapiens
SIIAMGNTL

SEQ ID NO: 173309 - protein, 9 aa, Homo Sapiens
SIIDDRVIL

SEQ ID NO: 173310 - protein, 9 aa, Homo Sapiens
SIPKDKQML

SEQ ID NO: 173311 - protein, 9 aa, Homo Sapiens
SIPKDSLRM

SEQ ID NO: 173312 - protein, 9 aa, Homo Sapiens
SIPKISIDL

SEQ ID NO: 173313 - protein, 9 aa, Homo Sapiens
SIPTKALEL

SEQ ID NO: 173314 - protein, 9 aa, Homo Sapiens
SITERALKL

SEQ ID NO: 173315 - protein, 9 aa, Homo Sapiens
SITKNTAKL

SEQ ID NO: 173316 - protein, 9 aa, Homo Sapiens
SLIGEKVCL

SEQ ID NO: 173317 - protein, 9 aa, Homo Sapiens
SLIKHKIML

SEQ ID NO: 173318 - protein, 9 aa, Homo Sapiens
SLIVGGVDL

SEQ ID NO: 173319 - protein, 9 aa, Homo Sapiens
SLPDIKVYL

SEQ ID NO: 173320 - protein, 9 aa, Homo Sapiens
SLPGVALTL

SEQ ID NO: 173321 - protein, 9 aa, Homo Sapiens
SLPKPTIIL

SEQ ID NO: 173322 - protein, 9 aa, Homo Sapiens
SLPKTKLSL

SEQ ID NO: 173323 - protein, 9 aa, Homo Sapiens
SLPPGTVKL

SEQ ID NO: 173324 - protein, 9 aa, Homo Sapiens
SLPRFQVTL

SEQ ID NO: 173325 - protein, 9 aa, Homo Sapiens
SLPSTKPQL

SEQ ID NO: 173326 - protein, 9 aa, Homo Sapiens
SLPSWKSLL

SEQ ID NO: 173327 - protein, 9 aa, Homo Sapiens
SLRLPGLLL

SEQ ID NO: 173328 - protein, 9 aa, Homo Sapiens
SLTIDKLLL

SEQ ID NO: 173329 - protein, 9 aa, Homo Sapiens
SMAPGALLL

SEQ ID NO: 173330 - protein, 9 aa, Homo Sapiens
SMPDHSIHL

SEQ ID NO: 173331 - protein, 9 aa, Homo Sapiens
SMPKLFLHL

SEQ ID NO: 173332 - protein, 9 aa, Homo Sapiens
SNIYSKFLL

SEQ ID NO: 173333 - protein, 9 aa, Homo Sapiens
SRPGKNVQL

SEQ ID NO: 173334 - protein, 9 aa, Homo Sapiens
SRPKSNIVL

SEQ ID NO: 173335 - protein, 9 aa, Homo Sapiens
SRPLSAVVL

SEQ ID NO: 173336 - protein, 9 aa, Homo Sapiens
SRPRSSLSL

SEQ ID NO: 173337 - protein, 9 aa, Homo Sapiens
SSAPGPLEL

SEQ ID NO: 173338 - protein, 9 aa, Homo Sapiens
SSIKDKIVL

SEQ ID NO: 173339 - protein, 9 aa, Homo Sapiens
SSPGQAVEL

SEQ ID NO: 173340 - protein, 9 aa, Homo Sapiens
STPKHYIRF

SEQ ID NO: 173341 - protein, 9 aa, Homo Sapiens
STPTEKPKL

SEQ ID NO: 173342 - protein, 9 aa, Homo Sapiens
STVTTKVTL

SEQ ID NO: 173343 - protein, 9 aa, Homo Sapiens
SVIPDKPSL

SEQ ID NO: 173344 - protein, 9 aa, Homo Sapiens
SVIYKKFQL

SEQ ID NO: 173345 - protein, 9 aa, Homo Sapiens
SVPKHKLTL

SEQ ID NO: 173346 - protein, 9 aa, Homo Sapiens
SVPLAYFLL

SEQ ID NO: 173347 - protein, 9 aa, Homo Sapiens
SVVKGRLHL

SEQ ID NO: 173348 - protein, 9 aa, Homo Sapiens
SYPHHATQL

SEQ ID NO: 173349 - protein, 9 aa, Homo Sapiens
TAIRGAIIL

SEQ ID NO: 173350 - protein, 9 aa, Homo Sapiens
TFPNNPVEL

SEQ ID NO: 173351 - protein, 9 aa, Homo Sapiens
TFPQNPVEL

SEQ ID NO: 173352 - protein, 9 aa, Homo Sapiens
TFPVHRQKL

SEQ ID NO: 173353 - protein, 9 aa, Homo Sapiens
TIIANCIVL

SEQ ID NO: 173354 - protein, 9 aa, Homo Sapiens
TIIKDCLYL

SEQ ID NO: 173355 - protein, 9 aa, Homo Sapiens
TIIKEQFAL

SEQ ID NO: 173356 - protein, 9 aa, Homo Sapiens
TIILSKMML

SEQ ID NO: 173357 - protein, 9 aa, Homo Sapiens
TLIGSKFRL

SEQ ID NO: 173358 - protein, 9 aa, Homo Sapiens
TLPAITLKL

SEQ ID NO: 173359 - protein, 9 aa, Homo Sapiens
TLPPQKPEL

SEQ ID NO: 173360 - protein, 9 aa, Homo Sapiens
TLVKNCIVL

SEQ ID NO: 173361 - protein, 9 aa, Homo Sapiens
TMPPTTVIL

SEQ ID NO: 173362 - protein, 9 aa, Homo Sapiens
TMVKKKVVF

SEQ ID NO: 173363 - protein, 9 aa, Homo Sapiens
TNVINKIIL

SEQ ID NO: 173364 - protein, 9 aa, Homo Sapiens
TQPERYIHL

SEQ ID NO: 173365 - protein, 9 aa, Homo Sapiens
TRPEKALIL

SEQ ID NO: 173366 - protein, 9 aa, Homo Sapiens
TSPKQSVYL

SEQ ID NO: 173367 - protein, 9 aa, Homo Sapiens
TTPKHYIRF

SEQ ID NO: 173368 - protein, 9 aa, Homo Sapiens
TYPGPAVVL

SEQ ID NO: 173369 - protein, 9 aa, Homo Sapiens
VFPHLTVVL

SEQ ID NO: 173370 - protein, 9 aa, Homo Sapiens
VFPKEPVEL

SEQ ID NO: 173371 - protein, 9 aa, Homo Sapiens
VFPSMPIKL

SEQ ID NO: 173372 - protein, 9 aa, Homo Sapiens
VIAPNPAQL

SEQ ID NO: 173373 - protein, 9 aa, Homo Sapiens
VIAPPLIKF

SEQ ID NO: 173374 - protein, 9 aa, Homo Sapiens
VIIKQGCLL

SEQ ID NO: 173375 - protein, 9 aa, Homo Sapiens
VIPKSKFVL

SEQ ID NO: 173376 - protein, 9 aa, Homo Sapiens
VIPPFCNLL

SEQ ID NO: 173377 - protein, 9 aa, Homo Sapiens
VIPPGSVLL

SEQ ID NO: 173378 - protein, 9 aa, Homo Sapiens
VIPSTGIKL

SEQ ID NO: 173379 - protein, 9 aa, Homo Sapiens
VIVAGGVEL

SEQ ID NO: 173380 - protein, 9 aa, Homo Sapiens
VLPKLYVKL

SEQ ID NO: 173381 - protein, 9 aa, Homo Sapiens
VLPKSRVEL

SEQ ID NO: 173382 - protein, 9 aa, Homo Sapiens
VLPNTALHL

SEQ ID NO: 173383 - protein, 9 aa, Homo Sapiens
VLPPEPVQL

SEQ ID NO: 173384 - protein, 9 aa, Homo Sapiens
VLPPTCIQL

SEQ ID NO: 173385 - protein, 9 aa, Homo Sapiens
VMAPRTLFL

SEQ ID NO: 173386 - protein, 9 aa, Homo Sapiens
VMPPQPVVL

SEQ ID NO: 173387 - protein, 9 aa, Homo Sapiens
VQPSKYHFL

SEQ ID NO: 173388 - protein, 9 aa, Homo Sapiens
VSPKKSTVL

SEQ ID NO: 173389 - protein, 9 aa, Homo Sapiens
VSPRQTLEL

SEQ ID NO: 173390 - protein, 9 aa, Homo Sapiens
VTIKKALTL

SEQ ID NO: 173391 - protein, 9 aa, Homo Sapiens
VVAKDGLKL

SEQ ID NO: 173392 - protein, 9 aa, Homo Sapiens
VVAPAGITL

SEQ ID NO: 173393 - protein, 9 aa, Homo Sapiens
VVPKDRVAL

SEQ ID NO: 173394 - protein, 10 aa, Homo Sapiens
ALAQAHLPRL

SEQ ID NO: 173395 - protein, 10 aa, Homo Sapiens
ALRGLERLLL

SEQ ID NO: 173396 - protein, 10 aa, Homo Sapiens
EGFPKVSILL

SEQ ID NO: 173397 - protein, 10 aa, Homo Sapiens
FSFPCHQTKL

SEQ ID NO: 173398 - protein, 10 aa, Homo Sapiens
GGIKLHKNLL

SEQ ID NO: 173399 - protein, 10 aa, Homo Sapiens
ISLPRGKGIR

SEQ ID NO: 173400 - protein, 10 aa, Homo Sapiens
KAPKPGGLSL

SEQ ID NO: 173401 - protein, 10 aa, Homo Sapiens
KFPAYERVLL

SEQ ID NO: 173402 - protein, 10 aa, Homo Sapiens
KFPEIVAPLL

SEQ ID NO: 173403 - protein, 10 aa, Homo Sapiens
KFPQIGELIL

SEQ ID NO: 173404 - protein, 10 aa, Homo Sapiens
KFPSPPAFIF

SEQ ID NO: 173405 - protein, 10 aa, Homo Sapiens
KIGPITPLEF

SEQ ID NO: 173406 - protein, 10 aa, Homo Sapiens
KIIAENKIRL

SEQ ID NO: 173407 - protein, 10 aa, Homo Sapiens
KIIDRAITSL

SEQ ID NO: 173408 - protein, 10 aa, Homo Sapiens
KIIEARLKMY

SEQ ID NO: 173409 - protein, 10 aa, Homo Sapiens
KIIEDLGVHF

SEQ ID NO: 173410 - protein, 10 aa, Homo Sapiens
KIIKNKKAFL

SEQ ID NO: 173411 - protein, 10 aa, Homo Sapiens
KIPSSHPVSL

SEQ ID NO: 173412 - protein, 10 aa, Homo Sapiens
KIPTLKISLI

SEQ ID NO: 173413 - protein, 10 aa, Homo Sapiens
KISSVQPICL

SEQ ID NO: 173414 - protein, 10 aa, Homo Sapiens
KLAPPLVTLL

SEQ ID NO: 173415 - protein, 10 aa, Homo Sapiens
KLLKCSRLVL

SEQ ID NO: 173416 - protein, 10 aa, Homo Sapiens
KLPAEPPALL

SEQ ID NO: 173417 - protein, 10 aa, Homo Sapiens
KLPATEKPVL

SEQ ID NO: 173418 - protein, 10 aa, Homo Sapiens
KLPGDKGLVL

SEQ ID NO: 173419 - protein, 10 aa, Homo Sapiens
KLPKDTALLL

SEQ ID NO: 173420 - protein, 10 aa, Homo Sapiens
KLPPGFPVKL

SEQ ID NO: 173421 - protein, 10 aa, Homo Sapiens
KLPRHHPLVL

SEQ ID NO: 173422 - protein, 10 aa, Homo Sapiens
KLWPLPKALL

SEQ ID NO: 173423 - protein, 10 aa, Homo Sapiens
KTLDQAKAVL

SEQ ID NO: 173424 - protein, 10 aa, Homo Sapiens
KVPKERLALL

SEQ ID NO: 173425 - protein, 10 aa, Homo Sapiens
KVPPPWLIAM

SEQ ID NO: 173426 - protein, 10 aa, Homo Sapiens
KYFSGPAITL

SEQ ID NO: 173427 - protein, 10 aa, Homo Sapiens
KYVGSRPIKL

SEQ ID NO: 173428 - protein, 10 aa, Homo Sapiens
LRANGLLKII

SEQ ID NO: 173429 - protein, 10 aa, Homo Sapiens
NSSRLEPLVL

SEQ ID NO: 173430 - protein, 10 aa, Homo Sapiens
PLSMAPPLSL

SEQ ID NO: 173431 - protein, 10 aa, Homo Sapiens
PSFPVSTLKL

SEQ ID NO: 173432 - protein, 10 aa, Homo Sapiens
QSYPHHATQL

SEQ ID NO: 173433 - protein, 10 aa, Homo Sapiens
RFPGQLNADL

SEQ ID NO: 173434 - protein, 10 aa, Homo Sapiens
RFPNFTNQLL

SEQ ID NO: 173435 - protein, 10 aa, Homo Sapiens
RHPQPGAVEL

SEQ ID NO: 173436 - protein, 10 aa, Homo Sapiens
RIINLGPVML

SEQ ID NO: 173437 - protein, 10 aa, Homo Sapiens
RIPAEGRVAL

SEQ ID NO: 173438 - protein, 10 aa, Homo Sapiens
RISQLDALEL

SEQ ID NO: 173439 - protein, 10 aa, Homo Sapiens
RLGNIARLEL

SEQ ID NO: 173440 - protein, 10 aa, Homo Sapiens
RLPYKAGLSL

SEQ ID NO: 173441 - protein, 10 aa, Homo Sapiens
RLYPLRKYAV

SEQ ID NO: 173442 - protein, 10 aa, Homo Sapiens
RMDPLEAIQL

SEQ ID NO: 173443 - protein, 10 aa, Homo Sapiens
RRPKNVVLRL

SEQ ID NO: 173444 - protein, 10 aa, Homo Sapiens
RTLGLPALLL

SEQ ID NO: 173445 - protein, 10 aa, Homo Sapiens
RTPGNRIVYL

SEQ ID NO: 173446 - protein, 10 aa, Homo Sapiens
RVAGLQPVLL

SEQ ID NO: 173447 - protein, 10 aa, Homo Sapiens
RVPHTQAVVL

SEQ ID NO: 173448 - protein, 10 aa, Homo Sapiens
RYPVNSVNIL

SEQ ID NO: 173449 - protein, 10 aa, Homo Sapiens
SLKTVKPLSL

SEQ ID NO: 173450 - protein, 10 aa, Homo Sapiens
SLQHLTWLGL

SEQ ID NO: 173451 - protein, 10 aa, Homo Sapiens
SLQYLTPLIL

SEQ ID NO: 173452 - protein, 10 aa, Homo Sapiens
SLRDLPAQLL

SEQ ID NO: 173453 - protein, 10 aa, Homo Sapiens
SSIIADRIAL

SEQ ID NO: 173454 - protein, 10 aa, Homo Sapiens
SVAQVAPVDL

SEQ ID NO: 173455 - protein, 10 aa, Homo Sapiens
SVASVRPAVL

SEQ ID NO: 173456 - protein, 10 aa, Homo Sapiens
SVVGLKYLLL

SEQ ID NO: 173457 - protein, 10 aa, Homo Sapiens
SYRVVFPLEL

SEQ ID NO: 173458 - protein, 10 aa, Homo Sapiens
THPPGPAVQL

SEQ ID NO: 173459 - protein, 10 aa, Homo Sapiens
TLDGLPPLRL

SEQ ID NO: 173460 - protein, 11 aa, Homo Sapiens
KFPGPLENQRL

SEQ ID NO: 173461 - protein, 11 aa, Homo Sapiens
KFPSEYVPTVF

SEQ ID NO: 173462 - protein, 11 aa, Homo Sapiens
KIATPKVKNQL

SEQ ID NO: 173463 - protein, 11 aa, Homo Sapiens
KIIAGSVALFL

SEQ ID NO: 173464 - protein, 11 aa, Homo Sapiens
KIIEDLGVHFL

SEQ ID NO: 173465 - protein, 11 aa, Homo Sapiens
KIPSKELRVRL

SEQ ID NO: 173466 - protein, 11 aa, Homo Sapiens
KLGRHVRALVL

SEQ ID NO: 173467 - protein, 11 aa, Homo Sapiens
KLPATEKPVLL

SEQ ID NO: 173468 - protein, 11 aa, Homo Sapiens
KLPPTDAYYKL

SEQ ID NO: 173469 - protein, 11 aa, Homo Sapiens
KLPSGKLQVHL

SEQ ID NO: 173470 - protein, 11 aa, Homo Sapiens
KLPVANEYLLL

SEQ ID NO: 173471 - protein, 11 aa, Homo Sapiens
KMPQSMPEYAL

SEQ ID NO: 173472 - protein, 11 aa, Homo Sapiens
KSPASDTYIVF

SEQ ID NO: 173473 - protein, 11 aa, Homo Sapiens
PGSLIPEALRL

SEQ ID NO: 173474 - protein, 11 aa, Homo Sapiens
RIPHNNFYRKL

SEQ ID NO: 173475 - protein, 11 aa, Homo Sapiens
RPPSKPPPVEL

SEQ ID NO: 173476 - protein, 11 aa, Homo Sapiens
RSPGRAYALLL

SEQ ID NO: 173477 - protein, 11 aa, Homo Sapiens
TFSFPCHQTKL
